(19) United States
(12) Patent Application Publication
(10) Pub. No.: US 2024/0117295 A1
(43) Pub. Date: Apr. 11, 2024

(54) MICROORGANISMS AND USES THEREOF

(71) Applicant: United Kingdom Research and Innovation, Swindon, Wiltshire (GB)

(72) Inventors: Wesley E. ROBERTSON, Swindon (GB); Louise F. H. FUNKE, Swindon (GB); Daniel DE LA TORRE, Swindon (GB); Julius FREDENS, Swindon (GB); Thomas S. ELLIOTT, Swindon (GB); Daniel L. DUNKELMANN, Swindon (GB); Julian C.W. WILLIS, Swindon (GB); Adam T. BEATTIE, Swindon (GB); Jason W. CHIN, Swindon (GB)

(21) Appl. No.: 18/288,340

(22) PCT Filed: May 28, 2021
(86) PCT No.: PCT/EP2021/064391

§ 371 Date: Oct. 25, 2023

(51) Int. Cl. C12N 1/20; C12N 9/00; C12N 15/10

(52) U.S. Cl. CPC C12N 1/20; C12N 9/93; C12N 15/1024; C12R 2001/19

(57) ABSTRACT

The invention relates to prokaryotic cells for the production of polymers containing non-canonical amino acids, and to methods for making said cells. The invention also relates to newly obtainable polymers as produced by the cells of the invention. In addition, the invention relates to new orthogonal aminoacyl-tRNA synthetases (aaRSs) and orthogonal tRNAs, which may be used in pairs and find utility in host cells such as, but not limited to, the prokaryotic cells of the invention.

### FIELD OF THE INVENTION

[0001] The present invention relates to novel prokaryotic cells for the production of polymers containing non-canonical amino acids, and to methods for making said cells. The invention also relates to newly obtainable polymers as produced by the prokaryotic cells of the invention. In addition, the invention relates to new orthogonal aminoacyl-tRNA synthetases (aaRSs) and orthogonal tRNAs, which may be used in pairs and find utility in host cells such as, but not limited to, the prokaryotic cells of the invention.

### BACKGROUND OF THE INVENTION

[0002] Nature uses 64 triplet codons to encode the synthesis of proteins composed of the twenty canonical amino acids, and most amino acids are encoded by more than one synonymous codon. It is widely hypothesized that removing sense codons and the tRNAs that read them from the genome may enable the creation of cells with several properties not found in natural biology—including new modes of viral resistance and the ability to encode the biosynthesis of non-canonical heteropolymers (3-6). However, these hypotheses have not been experimentally tested and so remain conjecture.

[0003] Removing release factor-1 (RF-1) (and therefore the ability to efficiently terminate translation on the TAG stop codon) from E. coli, provides some resistance to a limited subset of phage. However, this resistance is not general and phage are often propagated in the absence of RF-1 (8) because the TAG stop codon is rarely used for the termination of translation, and—even when viral genes do terminate in an amber codon—the inability to read a stop codon does not limit the synthesis of full-length viral proteins. In contrast, sense codons are commonly at least 10 times more abundant than amber codons in viral genomes, and occur over the length of viral genes.

[0004] Current strategies for encoding new monomers in cells are limited to encoding a single type of monomer (commonly in response to the amber stop codon) (3, 10, 11), inefficient, or incompatible with encoding sequential monomers (12-17); these limitations preclude the synthesis of non-canonical heteropolymer sequences composed entirely of non-canonical monomers.

[0005] Recently a strain of E. coli, Syn61, was created with a synthetic recoded genome in which all annotated occurrences of two sense codons (serine codons TCG and TCA) and a stop codon (TAG) were replaced with synonymous codons (18). This strain grows 1.6-fold slower than the strain from which it was derived.

[0006] A need, therefore, remains for new platforms for the synthesis of polymers containing non-canonical amino acids.

[0007] Some of the current platforms for the synthesis of polymers containing a non-canonical amino acid make use of an orthogonal aaRS/tRNA pair. Such pairs may be used to insert the non-canonical amino acid during protein synthesis. These pairs must be further engineered to decode a distinct target codon and to use a unique monomer that is not a substrate for other aaRSs.

[0008] Should a platform be developed that is capable of inserting multiple non-canonical amino acids into a polymer, it might need to make use of multiple aaRS/tRNA pairs. The identification of multiple engineered mutually orthogonal aaRS/tRNA pairs that recognise distinct codons and incorporate distinct non-canonical amino acids (ncAAs) remains an outstanding challenge. Each new ncAA, aaRS, tRNA and codon must function together and be orthogonal to each endogenous amino acid, aaRS and group of isoacceptor tRNAs and their cognate group of codons. Therefore, for each new ncAA:aaRS:tRNA:codon set, three interactions must be established (ncAA:aaRS, aaRS:tRNA and tRNA:codon) and 120 interactions (6×20 interactions; this analysis counts all isoacceptors for a natural amino acid as one and all codons for an amino acid as one and therefore provides a conservative estimate of the interactions that must be controlled) between the new set and the endogenous translational machinery must be minimised. Moreover, when incorporating more than one ncAA, there is the potential for interactions between components of the additional ncAA:aaRS:tRNA:codon sets, and these must also be minimised. Generating ncAA:aaRS:tRNA:codon sets to encode three distinct ncAAs into a polypeptide requires nine specific interactions to be established and minimization of at least 378 specific interactions, including 18 interactions between components of the three sets.

[0009] As such, a need exists for the provision of new orthogonal aaRS/tRNA pairs and for the identification of aaRS/tRNA pairs that would be functional if used in combination.

### SUMMARY OF THE INVENTION

[0010] Provided herein are prokaryotic cells that are suitable for the production of polymers containing non-canonical amino acids. The inventors demonstrate that it is possible to remove one, two, or more endogenous tRNAs from a prokaryotic cell, e.g. by deletion of the endogenous genes, to result in a viable cell. The inventors demonstrate that the removed endogenous tRNAs may be replaced with orthogonal tRNAs. The inventors further provide methods to overcome any growth defects that may be introduced by these processes. The inventors also provide experimental data showing that the modified prokaryotic cells are completely resistant to phage.

[0011] In an aspect of the invention, there is provided a prokaryotic cell, wherein: the prokaryotic cell does not express a first endogenous tRNA and a second endogenous tRNA; and the prokaryotic cell comprises a genome wherein a first type of sense codon and a second type of sense codon have been recoded such that the first endogenous tRNA and the second endogenous tRNA are dispensable.

[0012] In some embodiments, the essential genes of the genome do not contain occurrences of the first type of sense codon, and the first endogenous tRNA is a cognate tRNA for the first type of sense codon; and/or the essential genes of the genome do not contain occurrences of the second type of sense codon, and the second endogenous tRNA is a cognate tRNA for the second type of sense codon.

[0013] In some embodiments, the genome comprises 5, 4, 3, 2, 1, or no occurrences of the first type of sense codon, and the first endogenous tRNA is a cognate tRNA for the first type of sense codon; and/or the genome of comprises 5, 4, 3, 2, 1, or no occurrences of the second type of sense codon, and the second endogenous tRNA is a cognate tRNA for the second type of sense codon.

[0014] In some embodiments, the first type of sense codon is TCA and the first endogenous tRNA is tRNA^{Ser}_{UGA}; and/or the second type of sense codon is TCG and the second endogenous is tRNA^{Ser}_{CGA}. A plurality of occurrences of the TCA codon in the parental strain may have been replaced with AGT; and/or a plurality of occurrences of the TCG codon in the parental strain may have been replaced with AGC.

[0015] In some embodiments, the prokaryotic cell does not express a first endogenous release factor; and a first type of stop codon has been recoded within the genome such that the first endogenous release factor is dispensable.

[0016] The essential genes of the genome may not contain occurrences of the first type of stop codon, and the first endogenous release factor may be a cognate release factor for the first type of stop codon.

[0017] The genome may comprise 5, 4, 3, 2, 1, or no occurrences of the first type of stop codon, and the first endogenous release factor may be a cognate release factor for the first type of stop codon. The first type of stop codon may be TAG and wherein the first endogenous release factor may be RF-1. Occurrences of the TAG codon in the parental strain may have been replaced with TAA.

[0018] In some embodiments, the genome is at least 80%, 85%, 90%, 95%, 98%, 99%, 99.5%, 99.8%, 99.9%, or 100% identical to any one of SEQ ID NOs: 3 to 8.

[0019] In some embodiments, the prokaryotic cell expresses a first orthogonal aminoacyl-tRNA synthetase and a first orthogonal tRNA, the first orthogonal aminoacyl-tRNA synthetase and the first orthogonal tRNA form a first orthogonal aminoacyl-tRNA synthetase-tRNA pair, and the first orthogonal tRNA is capable of decoding the first type of sense codon.

[0020] The first orthogonal aminoacyl-tRNA synthetase may be MmPylRS or a variant with altered selectivity to a non-canonical amino acid, and the first orthogonal tRNA may be MmtRNA^{Pyl}_{YYY} or MmtRNA^{Pyl}_{UGA}.

[0021] In some embodiments, the prokaryotic cell expresses a second orthogonal aminoacyl-tRNA synthetase and a second tRNA, the second orthogonal aminoacyl-tRNA synthetase and the second orthogonal tRNA form a second orthogonal aminoacyl-tRNA synthetase-tRNA pair, and the second orthogonal tRNA is capable of decoding the second type of sense codon.

[0022] The second orthogonal aminoacyl-tRNA synthetase may be 1R26PylRS or a variant with altered selectivity to a non-canonical amino acid, and the second orthogonal tRNA may be AlvtRNA^{ΔNPyl(8)}_{YYY} or AlvtRNA^{ΔNPyl(8)}_{CGA}.

[0023] In some embodiments, the prokaryotic cell expresses a third orthogonal aminoacyl-tRNA synthetase and a third orthogonal tRNA, the third orthogonal aminoacyl-tRNA synthetase and the third orthogonal tRNA form a third orthogonal aminoacyl-tRNA synthetase-tRNA pair, and the third orthogonal tRNA is capable of decoding the first type of stop codon.

[0024] The third orthogonal aminoacyl-tRNA synthetase-tRNA pair may be AfTyrRS or a variant with altered selectivity to a non-canonical amino acid, and Af-tRNA^{Tyr(A01)}_{YYY}; or MjTyrRS or a variant with altered selectivity to a non-canonical amino acid, and MjtRNA^{Tyr}_{YYY}.

[0025] The growth rate of the prokaryotic cell may be faster than the growth rate of a reference prokaryotic cell of a parental strain. The reference prokaryotic cell may be of a parental strain directly obtained upon recoding of the genome to remove the first type of sense codon, the second type of sense codon, and the first type of stop codon. The reference prokaryotic cell may be of a parental strain directly obtained upon removal of the first endogenous tRNA, the second endogenous tRNA, and the first endogenous release factor.

[0026] The prokaryotic cell may be resistant to phage infection and/or horizontal transfer of the F plasmid. The prokaryotic cell may be completely resistant to phage infection and/or horizontal transfer of the F plasmid.

[0027] The prokaryotic cell may be a bacterial cell or an Escherichia coli cell. The prokaryotic cell is viable.

[0028] In an aspect of the invention, there is provided a prokaryotic cell with a genome that is at least 80%, 85%, 90%, 95%, 98%, 99%, 99.5%, 99.8%, 99.9%, or 100% identical to any one of SEQ ID NOs: 3 to 8. The calculation of the sequence identity may exclude any exogenous sequences, for instance any sequences for the insertion of orthogonal aaRS/tRNA pairs.

[0029] In another aspect of the invention, there is provided a method for producing a modified prokaryotic cell, wherein the method comprises:
[0030] (i) modifying a prokaryotic cell to express a first orthogonal aminoacyl-tRNA synthetase-tRNA pair suitable for decoding a first type of sense codon, wherein
   [0031] the prokaryotic cell comprises a genome wherein the first type of sense codon has been recoded such that a first endogenous tRNA is dispensable;
[0032] (ii) incubating the prokaryotic cell in the presence of a non-canonical amino acid which is a substrate for the first orthogonal aminoacyl-tRNA synthetase; and
[0033] (iii) modifying the endogenous gene encoding the first endogenous tRNA such that the first endogenous tRNA is not expressed.

[0034] In an embodiment, steps (i) and (ii) are performed before step (iii). In another embodiment, step (iii) is performed before step (i) and (ii).

[0035] The method may further comprise:
[0036] (a) modifying the prokaryotic cell to express a second orthogonal aminoacyl-tRNA synthetase-tRNA pair suitable for decoding a second type of sense codon, wherein
   [0037] the prokaryotic cell comprises a genome wherein the second type of sense codon has been recoded such that a second endogenous tRNA is dispensable;
[0038] (b) incubating the prokaryotic cell in the presence of a non-canonical amino acid which is a substrate for the second orthogonal aminoacyl-tRNA synthetase; and
[0039] (c) modifying the endogenous gene encoding the second endogenous tRNA such that the second endogenous tRNA is not expressed.

[0040] In an embodiment, steps (i) and (ii) are performed before step (iii), and/or steps (a) and (b) are performed before step (c). In another embodiment, step (iii) is performed before steps (i) and (ii), and/or step (c) is performed before steps (a) and (b).

[0041] In some embodiments, steps (a), (b), and (c) are performed before steps (i), (ii), (iii); or step (a) is performed concurrently with step (i), step (b) is performed concurrently with step (ii), and step (c) is performed concurrently with step (iii); or steps (a), (b), and (c) are performed after steps (i), (ii), (iii).

[0042] The essential genes of the genome may not contain occurrences of the first type of sense codon, or the genome may comprise 5, 4, 3, 2, 1, or no occurrences of the first type of sense codon. The first type of sense codon may be TCA and the first endogenous tRNA may be tRNA^{Ser}_{UGA}. The TCA codon may have been replaced with AGT.

[0043] The first orthogonal aminoacyl-tRNA synthetase may be MmPylRS or a variant with altered selectivity to a non-canonical amino acid, and the first orthogonal tRNA may be MmtRNA^{Pyl}_{YYY} or MmtRNA^{Pyl}_{UGA}.

[0044] The essential genes of the genome may not contain occurrences of the second type of sense codon, or the genome of may comprise 5, 4, 3, 2, 1, or no occurrences of the second type of sense codon. The second type of sense codon may be TCG and the second endogenous tRNA may be tRNA^{Ser}_{CGA}. The TCG codon may be replaced with AGC.

[0045] The second orthogonal aminoacyl-tRNA synthetase may be 1R26PylRS or a variant with altered selectivity to a non-canonical amino acid, and the second orthogonal tRNA may be AlvtRNA^{ΔNPyl(8)}_{YYY} or AlvtRNA^{ΔNPyl(8)}_{CGA}.

[0046] The genome of the prokaryotic cell to which the method is applied may be at least 80%, 85%, 90%, 95%, 98%, 99%, 99.5%, 99.8%, 99.9%, or 100% identical to any one of: GenBank accession number CP040347.1, SEQ ID NO: 3, or SEQ ID NO: 4.

[0047] The method may further comprise modifying the prokaryotic cell to express a third orthogonal aminoacyl-tRNA synthetase-tRNA pair suitable for decoding a first type of stop codon, wherein a first type of stop codon has been recoded within the genome such that a first endogenous release factor is dispensable. The essential genes of the genome may not contain occurrences of the first type of stop codon or the genome may comprise 5, 4, 3, 2, 1, or no occurrences of the first type of stop codon. The first type of stop codon may be TAG and wherein the cognate release factor for the first type of stop codon may be RF-1. The TAG codon may be replaced with TAA.

[0048] The third orthogonal aminoacyl-tRNA synthetase-tRNA pair may be AfTyrRS or a variant with altered selectivity to a non-canonical amino acid, and Af-tRNA^{Tyr(A01)}_{YYY}; or MjTyrRS or a variant with altered selectivity to a non-canonical amino acid, and MjtRNA^{Tyr}_{YYY}.

[0049] The method may comprise, prior to step (i) and (a):
[0050] inducing mutagenesis in a cell culture comprising the prokaryotic cell that comprises the recoded genome,
[0051] maintaining the cell culture under exponential growth conditions,
[0052] selecting a prokaryotic cell, from said cell culture, with an increased growth rate compared to the initial culture; and
   wherein step (i) or (a) may be applied to the selected prokaryotic cell.

[0053] The mutagenesis, mutation, and selection may be part of a parallel mutagenesis and dynamic parallel selection process. The induction of mutagenesis may comprise the use of a mutagenesis plasmid. The mutagenesis plasmid may be MP6.

[0054] In an embodiment, prior to step (i), two rounds of mutagenesis and selection are applied.

[0055] The method may further comprises, after step (iii) and/or (c):
[0056] obtaining a cell culture from the prokaryotic cell,
[0057] inducing mutagenesis in the cell culture,
[0058] maintaining the cell culture under exponential growth conditions, and
[0059] selecting a prokaryotic cell, from said cell culture, with an increased growth rate compared to the initial culture.

[0060] The mutagenesis, mutation, and selection may be part of a parallel mutagenesis and dynamic parallel selection process. The induction of mutagenesis may comprise the use of a mutagenesis plasmid, wherein the mutagenesis plasmid does not contain any occurrences of the first or second type of sense codon nor any occurrences of the first type of stop codon. The mutagenesis plasmid may be MP6, wherein the MP6 has been recoded to not contain any occurrences of the first or second type of sense codon nor any occurrences of the first type of stop codon. Three rounds of mutagenesis and selection may be applied.

[0061] In methods of the invention, mutagenesis may be carried out for 5, 10, 15, 17, 20, 30, 45, 60, 70, 80, 100, 150, 200, or more generations; and/or the cell culture may be maintained under exponential growth conditions for 5, 10, 15, 20, 30, 40, 50, 52, 60, 70, 80, 100, 200, or more generations.

[0062] In some embodiments, the prokaryotic cell is a bacterial cell or an Escherichia coli cell.

[0063] In an aspect of the invention, there is provided a method of synthesising a polymer, comprising:
[0064] i) providing a prokaryotic cell of the invention, or generated according to the methods of the invention, wherein the prokaryotic cell comprises the first orthogonal aminoacyl-tRNA synthetase-tRNA pair; and
[0065] contacting said prokaryotic cell with a nucleic acid sequence encoding a polymer, said nucleic acid sequence comprising the first type of sense codon;
[0066] ii) incubating the prokaryotic cell in the presence of a first non-canonical amino acid, wherein the first non-canonical amino acid is a substrate for the first orthogonal aminoacyl-tRNA synthetase; and
[0067] iii) incubating the prokaryotic cell to allow incorporation of the first non-canonical amino acid into the polymer via the first orthogonal aminoacyl-tRNA synthetase-tRNA pair.

[0068] In an embodiment, the prokaryotic cell comprises the second orthogonal aminoacyl-tRNA synthetase-tRNA pair and the nucleic acid sequence comprises the second type of sense codon, and
[0069] step ii) comprises incubating the prokaryotic cell in the presence of a second non-canonical amino acid, wherein the second non-canonical amino acid is a substrate for the second orthogonal aminoacyl-tRNA synthetase; and
[0070] step iii) comprises incubating the prokaryotic cell to allow incorporation of the second non-canonical amino acid into the polymer via the second first orthogonal aminoacyl-tRNA synthetase-tRNA pair.

[0071] In another embodiment, the prokaryotic cell comprises the third orthogonal aminoacyl-tRNA synthetase-tRNA pair and the nucleic acid sequence comprises the first type of stop codon, and
[0072] step ii) comprises incubating the prokaryotic cell in the presence of a third non-canonical amino acid, wherein the third non-canonical amino acid is a substrate for the third orthogonal aminoacyl-tRNA synthetase; and
[0073] step iii) comprises incubating the prokaryotic cell to allow incorporation of the third non-canonical amino acid into the polymer via the third first orthogonal aminoacyl-tRNA synthetase-tRNA pair.

[0074] Any of the methods of synthesising a polymer, may further comprise purifying the synthesised polymer.

[0075] The synthesised polymer may comprise at least one non-canonical amino acid directly adjacent to another non-canonical amino acid. The polymer may comprises a chain of two, three, four, five, six, seven, eight, nine, ten, 15, 20, or more non-canonical amino acids directly adjacent to each other. The polymer may be a macrocycle. The non-canonical amino acids may be any one of, or any combination of, BocK, CbzK, AllocK, p-I-Phe, CypK, AlkK, 3-Nitro-Tyr, and p-Az-Phe.

[0076] In an aspect of the invention, there is provided a polymer obtained from or obtainable by the methods of synthesising a polymer of the invention.

[0077] In an aspect of the invention, there is provided an isolated 1R26PylRS, or a variant with altered selectivity to a non-canonical amino acid. The isolated 1R26PylRS may be at least 50%, 60%, 70%, 80%, 90%, 95%, 99%, or 100% identical to SEQ ID NO: 9, comprising any one of the following groups of mutations: i) L121L, L125L, Y126G, M129L, N166N, V168V, Y206Y, A223A; ii) L121L, L125L, Y126Y, M129A, N166N, V168V, Y206F, A223A; iii) L121L, L125L, Y126Y, M129M, N166Q, V168V, Y206F, A223A; iv) L121L, L125L, Y126Y, M129M, N166S, V168M, Y206F, A223G; and v) L121M, L125I, Y126F, M129A, N166N, V168F, Y206Y, A223A. The isolated 1R26PylRS may be at least 50%, 60%, 70%, 80%, 90%, 95%, 99%, or 100% similar or identical to any one of SEQ ID NOs: 10 to 14.

[0078] In an aspect of the invention, there is provided an isolated Archaeoglobus fulgidus tyrosyl-tRNA synthetase (AfTyrRS), or a variant with altered selectivity to a non-canonical amino acid. The isolated AfTyrRS may be at least 50%, 60%, 70%, 80%, 90%, 95%, 99%, or 100% identical to SEQ ID NO: 16, comprising any one of the following groups of mutations: i) Y36I, L69M, H74L, Q116E, D165T, I166G, and N190N; ii) Y36T, L69L, H74L, Q116E, D165T, I166G, N190K; and iii) Y36I, L69L, H74L, Q116E, D165T, I166G, N190N. The isolated AfTyrRS may be at least 50%, 60%, 70%, 80%, 90%, 95%, 99%, or 100% similar or identical to any one of SEQ ID NOs: 16 to 19.

[0079] In an aspect of the invention, there is provided an isolated Lum1PylRS, or a variant with altered selectivity to a non-canonical amino acid. The Lum1PylRS may be at least 50%, 60%, 70%, 80%, 90%, 95%, 99%, or 100% identical to SEQ ID NO: 32, comprising any one of the following groups of mutations: i) L121L, L125L, Y126G, M129L, V168V; and ii) L121M, L125I, Y126F, M129A, V168F. The Lum1PylRS may be at least 50%, 60%, 70%, 80%, 90%, 95%, 99%, or 100% similar or identical to any one of SEQ ID NOs: 32 to 34.

[0080] In an aspect of the invention, there is provided an isolated NitroPylRS, or a variant with altered selectivity to a non-canonical amino acid. The NitroPylRS may be at least 50%, 60%, 70%, 80%, 90%, 95%, 99%, or 100% identical to SEQ ID NO: 36, comprising the following substitutions L123M, L127I, Y128F, M131A, and V169F. The NitroPylRS may be at least 50%, 60%, 70%, 80%, 90%, 95%, 99%, or 100% similar or identical to SEQ ID NO: 35 or SEQ ID NO: 36.

[0081] In an aspect of the invention, there is provided an isolated ClosΔNTDPylRS, or a variant with altered selectivity to a non-canonical amino acid. The ClosΔNTDPylRS may be at least 50%, 60%, 70%, 80%, 90%, 95%, 99%, or 100% identical to SEQ ID NO: 37, comprising any one of the following groups of mutations: i) Y126G, M129L, Y208Y, and ii) Y126Y, M129A, Y208F. The ClosΔTDPylRS may be at least 50%, 60%, 70%, 80%, 90%, 95%, 99%, or 100% similar or identical to any one of SEQ ID NOs: 37 to 39.

[0082] In an aspect of the invention, there is provided an isolated TronΔNTDPylRS, or a variant with altered selectivity to a non-canonical amino acid. The TronΔNTDPylRS may be at least 50%, 60%, 70%, 80%, 90%, 95%, 99%, or 100% similar or identical to SEQ ID NO: 40.

[0083] In an aspect of the invention, there is provided an isolated GemmΔNTDPylRS, or a variant with altered selectivity to a non-canonical amino acid. The GemmΔNTDPylRS may be at least 50%, 60%, 70%, 80%, 90%, 95%, 99%, or 100% similar or identical to SEQ ID NO: 41.

[0084] In an aspect of the invention, there is provided an isolated PGA8ΔNTDPylRS, or a variant with altered selectivity to a non-canonical amino acid. The PGA8ΔNTDPylRS may be at least 50%, 60%, 70%, 80%, 90%, 95%, 99%, or 100% similar or identical to SEQ ID NO: 42.

[0085] In an aspect of the invention, there is provided an isolated I2ΔNTDPylRS, or a variant with altered selectivity to a non-canonical amino acid. The I2ΔNTDPylRS may be at least 50%, 60%, 70%, 80%, 90%, 95%, 99%, or 100% similar or identical to SEQ ID NO: 43.

[0086] In an aspect of the invention, there is provided an isolated D121ΔNTDPylRS, or a variant with altered selectivity to a non-canonical amino acid. The D121ΔNTDPylRS may be at least 50%, 60%, 70%, 80%, 90%, 95%, 99%, or 100% similar or identical to SEQ ID NO: 44.

[0087] In an aspect of the invention, there is provided an isolated D416ΔNTDPylRS, or a variant with altered selectivity to a non-canonical amino acid. The D416ΔNTDPylRS may be at least 50%, 60%, 70%, 80%, 90%, 95%, 99%, or 100% similar or identical to SEQ ID NO: 45.

[0088] The tRNA synthetase of the invention may have altered selectivity towards any of: AllocK, AlkK, BocK, Bta, CbzK, CypK, 3-Nitro-Tyr, NMH, p-I-Phe, and p-Az-Phe, and o-Methyl-Tyrosine.

[0089] In an aspect of the invention, there is provided an isolated tRNA, wherein the isolated tRNA is at least 80%, 90%, 95%, 99%, or 100% identical to any one of SEQ ID NOs: 15, 20, 46-52, 54-58, 61-66.

[0090] In an aspect of the invention, there is provided a host cell comprising a tRNA synthetase according to the invention and a tRNA, wherein the tRNA synthetase and tRNA form an orthogonal aminoacyl-tRNA synthetase-tRNA pair.

[0091] In an aspect of the invention, there is provided a host cell comprising any combination of two or three items selected from the list:
[0092] (i) the tRNA synthetase according to the invention and a tRNA, wherein the tRNA synthetase and tRNA form an orthogonal aminoacyl-tRNA synthetase-tRNA pair;
[0093] (ii) an Archaeoglobus fulgidus tyrosyl-tRNA synthetase (AfTyrRS), or a variant with altered selectivity to a non-canonical amino acid, and an Af-tRNA^{Tyr(A01)}_{YYY}, wherein the AfTyrRS and Af-tRNA^{Tyr(A01)}_{YYY} form an orthogonal aminoacyl-tRNA synthetase-tRNA pair;
[0094] (iii) a MmPylRS tRNA synthetase, or a variant with altered selectivity to a non-canonical amino acid, and a MmtRNA^{Pyl}_{YYY}, wherein the MmPylRS tRNA synthetase and the MmtRNA^{Pyl}_{YYY} form an orthogonal aminoacyl-tRNA synthetase-tRNA pair.

[0095] In an aspect of the invention, there is provided a host cell comprising any combination of two or three items selected from the list:
[0096] (i) the tRNA synthetase according to the invention and a tRNA, wherein the tRNA synthetase and tRNA form an orthogonal aminoacyl-tRNA synthetase-tRNA pair;
[0097] (ii) an AfTyrRS, or a variant with altered selectivity to a non-canonical amino acid, and an Af-tRNA^{Tyr(A01)}_{YYY}, wherein the AfTyrRS and Af-tRNA^{Tyr(A01)}_{YYY} form an orthogonal aminoacyl-tRNA synthetase-tRNA pair;
[0098] (iii) an M jannaschii tyrosyl-tRNA synthetase (MjTyrRS), or a variant with altered selectivity to a non-canonical amino acid, and a MjtRNA^{Tyr}_{YYY}, wherein the MjTyrRS and the MjtRNA^{Tyr}_{YYY} form an orthogonal aminoacyl-tRNA synthetase-tRNA pair.

[0099] In an aspect of the invention, there is provided a host cell comprising any combination of two or three items selected from the list: i) a class A ΔNPylRS/^{ΔNPyl}tRNA pair; ii) a class B ΔNPylRS/^{ΔNPyl}tRNA pair; and iii) an MmPylRS/Spe^{Pyl}tRNA pair.

[0100] The host cell may be a prokaryotic cell or eukaryotic cell, a bacterial cell, an E. coli. cell, a mammalian cell, an insect cell, or a human cell.

[0101] In an aspect of the invention, there is provided a method for improving the growth rate of a prokaryotic cell wherein the genome has been recoded, wherein the method comprises:
[0102] inducing mutagenesis in a cell culture comprising the prokaryotic cell that comprises the recoded genome,
[0103] maintaining the cell culture under exponential growth conditions,
[0104] selecting a prokaryotic cell, from said cell culture, with an increased growth rate compared to the initial culture.

[0105] The mutagenesis, mutation, and selection may be part of a parallel mutagenesis and dynamic parallel selection process. The induction of mutagenesis may comprise the use of a mutagenesis plasmid. The mutagenesis plasmid may be a recoded mutagenesis plasmid, for instance recoded to remove a first and/or a second type of sense codon, and optionally a first type of stop codon. The mutagenesis plasmid may be MP6. Two rounds of mutagenesis and selection may be applied. The mutagenesis may be carried out for 5, 10, 15, 17, 20, 30, 45, 60, 70, 80, 100, 150, 200, or more generations; and/or the cell culture may be maintained under exponential growth conditions for 5, 10, 15, 20, 30, 40, 50, 52, 60, 70, 80, 100, 200, or more generations. The prokaryotic cell may be a bacterial cell or an Escherichia coli cell.

[0106] In an aspect of the invention, there is provided a prokaryotic cell obtained or obtainable by any of the methods for improving the growth rate of a prokaryotic cell of the invention, wherein the growth rate of the prokaryotic cell is faster than the growth rate of a reference prokaryotic cell of a parental strain.

[0107] In an aspect of the invention, there is provided a prokaryotic cell, wherein the prokaryotic cell: does not express a first endogenous tRNA; comprises a genome wherein a first type of sense codon has been recoded such that the first endogenous tRNA is dispensable; expresses a first orthogonal aminoacyl-tRNA synthetase and a first orthogonal tRNA, the first orthogonal aminoacyl-tRNA synthetase and the first orthogonal tRNA form a first orthogonal aminoacyl-tRNA synthetase-tRNA pair, and the first orthogonal tRNA is capable of decoding the first type of sense codon.

[0108] The essential genes of the genome may not contain occurrences of the first type of sense codon, and the first endogenous tRNA may be a cognate tRNA for the first type of sense codon. The genome may comprise 5, 4, 3, 2, 1, or no occurrences of the first type of sense codon, and the first endogenous tRNA may be a cognate tRNA for the first type of sense codon. The first type of sense codon may be TCA and the first endogenous tRNA may be tRNA^{Ser}_{UGA}; or the first type of sense codon may be TCG and the first endogenous may be tRNA^{Ser}_{CGA}. A plurality of occurrences of the TCA codon in the parental strain may have been replaced with AGT; and/or a plurality of occurrences of the TCG codon in the parental strain may have been replaced with AGC.

[0109] In a further embodiment, the prokaryotic cell does not express a second endogenous tRNA; comprises a genome wherein a second type of sense codon has been recoded such that the second endogenous tRNA is dispensable; expresses a second orthogonal aminoacyl-tRNA synthetase and a second tRNA, the second orthogonal aminoacyl-tRNA synthetase and the 20 second orthogonal tRNA form a second orthogonal aminoacyl-tRNA synthetase-tRNA pair; and the second orthogonal tRNA is capable of decoding the second type of sense codon. The essential genes of the genome may not contain occurrences of the second type of sense codon, and the second endogenous tRNA may be a cognate tRNA for the second type of sense codon. The genome may comprise 5, 4, 3, 2, 1, or no occurrences of the second type of sense codon, and the second endogenous tRNA may be a cognate tRNA for the second type of sense codon. The second type of sense codon may be TCA and the second endogenous tRNA may be tRNA^{Ser}_{UGA}; or the second type of sense codon may be TCG and the second endogenous may be tRNA^{Ser}_{CGA}.

[0110] In a further embodiment, the prokaryotic cell does not express a first endogenous release factor; a first type of stop codon has been recoded within the genome such that the first endogenous release factor is dispensable; the prokaryotic cell expresses a third orthogonal aminoacyl-tRNA synthetase and a third orthogonal tRNA; the third orthogonal aminoacyl-tRNA synthetase and the third orthogonal tRNA form a third orthogonal aminoacyl-tRNA synthetase-tRNA pair; and the third orthogonal tRNA is capable of decoding the first type of stop codon. The essential genes of the genome may not contain occurrences of the first type of stop codon, and the first endogenous release factor may be a cognate release factor for the first type of stop codon. The genome may comprise 5, 4, 3, 2, 1, or no occurrences of the first type of stop codon, and the first endogenous release factor may be a cognate release factor for the first type of stop codon. The first type of stop codon may be TAG and wherein the first endogenous release factor may be RF-1. Occurrences of the TAG codon in the parental strain may have been replaced with TAA.

[0111] The prokaryotic cell may be a bacterial cell or an Escherichia coli cell. The prokaryotic cell is viable.

### BRIEF DESCRIPTION OF THE DRAWINGS

[0112] FIG. 1. Strain evolution and creation of Syn61Δ3.

[0113] (A) Schematic of strain evolution. The codons that encode serine and protein termination are connected to the anticodons of the tRNAs or release factors predicted to decode them by black lines. The genes encoding the corresponding tRNAs and release factors are indicated in the black boxes. Cells with the decoding rules of Syn61 are denoted with a pink box throughout. Two rounds of parallel mutagenesis and dynamic selection created Syn61, Syn61(ev2). serT, serU, and prfA were then deleted to create Syn61Δ3. Finally, three rounds of parallel mutagenesis and dynamic selection were applied to create Syn61Δ3(ev5); Syn61Δ3 and Syn61Δ3(ev5) are represented by the light teal box throughout.

[0114] (B) Growth rates of Syn61 and all intermediate strains in the development of Syn61Δ3(ev5). Growth rates were calculated based on growth curves measured for n=8 replicate cultures for each strain. For statistics see Methods.

[0115] FIG. 2. Lytic phage propagation and cell lysis is obstructed in Syn61Δ3.

[0116] (A) Schematic of viral infection of Syn61Δ3. Deletion of serU (encoding tRNA^{Ser}_{CGA}), serT (encoding tRNA^{Ser}_{UGA}), and prfA (encoding RF-1) makes the UCG, UCA and UAG codons unreadable and the ribosome will stall at these codons within an mRNA that contains them, as shown here for a viral mRNA.

[0117] (B) Schematic of the number of TCG, TCA, and TAG codons and their positions in the genome of T6 phage.

[0118] (C) Cultures were infected with T6 phage at a multiplicity of infection (MOI) of 5·10⁻² and the total titer (intracellular phage plus free phage) was monitored over 4 hours. Treatment with gentamicin was used to ablate protein synthesis and provides a control for cells that cannot synthesize viral proteins or produce new viral particles.

[0119] (D) T6 efficiently lyses Syn61 variants but not Syn61Δ3. Cultures were infected as in panel (C) and OD₆₀₀ was measured after 4 hours.

[0120] (E) Number of the indicated codons per kb in each indicated phage.

[0121] (F-G) Syn61Δ3 survives simultaneous infection of multiple phage: (F) photos of the culture at the indicated timepoints following infection (+) or without infection (−). Cultures were infected with phage λ, P1, T4, T6, and T7, each with MOI=1·10⁻². (G) OD₆₀₀ of the cultures was measured after 4 hours. All experiments were performed in three independent replicates, the dots represent the independent replicates and the line (panel (C)) or bar (panels (D) and (G)) represents the mean. The photo (panel (F)) is a representative of data from three independent replicates.

[0122] FIG. 3. Reassigning two sense codons and a stop codon to non-canonical amino acid (ncAAs) in Syn61Δ3.

[0123] (A) Schematic of each codon reassignment. Introduction of an orthogonal aminoacyl-tRNA synthetase/tRNA_{YYY} pair—where YYY is the sequence of the anticodon of the orthogonal tRNA (encoded by O-tRNA)—to Syn61Δ3 (light teal box, as described in FIG. 1A) enables decoding of the cognate codon (XXX) introduced into a gene of interest. The orthogonal pair directs the incorporation of a non-canonical amino acid (ncAA) in response to the XXX codon. These codon reassignments are indicated in the dark grey box.

[0124] (B) TCG, TCA and TAG codons are not read by the translational machinery in Syn61Δ3, and codon reassignment enables ncAA incorporation into Ub_{11XXX}. Plasmids Encoding the orthogonal MmPylRS/MmtRNA^{Pyl}_{YYY} pair and a C-terminally His₆-tagged ubiquitin, with a single TCG, TCA, or TAG codon at position 11 (Ub_{11XXX}), or no target codons (wt) were introduced into Syn61Δ3. ‘XXX’ denotes a target codon and ‘YYY’ denotes a cognate anticodon. Expression of ubiquitin-His₆ was performed in the absence (−) or presence (+) of a ncAA substrate for MmPylRS, BocK. Full-length ubiquitin-His₆ was detected in cell lysate from an equal number of cells with an anti-His₆ antibody.

[0125] (C) Production of ubiquitin-His₆ incorporating BocK, Ub-(11BocK)-His₆, from a Ub_{11XXX} gene bearing the indicated target codon was confirmed by Electrospray ionization mass spectrometry (ESI-MS). Theoretical mass: 9487.7 Da; measured mass: 9487.8 Da (TCG), 9487.8 Da (TCA), 9488.0 (TAG). The peak of 100 Da smaller results from the loss of tert-butoxycarbonyl from BocK.

[0126] (D) As in panel (B) but using Ub_{11XXX,65XXX}, which contains target codons at positions 11 and 65 of the Ub gene.

[0127] (E) Production of ubiquitin-His₆ incorporating BocK at positions 11 and 65, from a Ub_{11XXX65XXX} gene bearing the indicated target codons was confirmed by ESI-MS. Theoretical mass: 9629.0 Da; measured mass: 9629.2 Da (TCG), 9629.0 Da (TCA), 9629.0 Da (TAG). The smaller peak of −100 Da corresponds to loss of tert-butoxycarbonyl from BocK.

[0128] (F) As in panel (B) but using Ub_{11XXX,14XXX,65XXX}, which contains target codons at positions 11, 14 and 65 of the Ub gene.

[0129] (G) Production of ubiquitin-His₆ incorporating BocK at positions 11, 14 and 65, from Ub_{11XXX,14XXX,65XXX} bearing the indicated target codons was confirmed by ESI-MS. Theoretical mass: 9756.1 Da; measured mass: 9756.2 Da (TCG), 9756.0 Da (TCA), 9756.0 Da (TAG). The smaller peaks of −100 Da or −200 Da correspond to loss of tert-butoxycarbonyl from one or two BocK residues, respectively.

[0130] (H) As in panel (B) but using Ub_{9XXX,11XXX,14XXX,65XXX}, which contains target codons at positions 9, 11, 14 and 65 of the Ub gene.

[0131] (I) Production of ubiquitin-His₆ incorporating BocK at positions 9, 11, 14 and 65, from Ub_{9XXX,11XXX,14XXX,65XXX} bearing the indicated target codons was confirmed by ESI-MS. Theoretical mass: 9883.3 Da; measured mass: 9883.2 Da (TCG), 9883.2 Da (TCA), 9883.2 Da (TAG). The smaller peaks of −100 Da or −200 Da correspond to loss of tert-butoxycarbonyl from one or two BocK residues, respectively. All experiments were performed in biological replicates three times with similar results.

[0132] FIG. 4. Double and triple incorporation of distinct non-canonical amino acids into TCG, TCA, and TAG codons in Syn61Δ3 cells.

[0133] (A) Reassignment of TCG (blue box), TCA (gold box) and TAG (green box) codons to distinct ncAAs in Syn61Δ3. Reassigning all three codons to distinct ncAAs in a single cell requires three engineered triply orthogonal aminoacyl-tRNA synthetase/tRNA pairs. Each pair must recognize a distinct ncAA and decode a distinct codon. The tRNAs from these triply orthogonal pairs are labelled O-tRNA¹⁻³.

[0134] (B) The incorporation of two distinct non-canonical amino acids in response to TCG and TAG codons in a single gene. Syn61Δ3(ev4)—containing the 1R26PylRS(CbzK)/AlvtRNA^{ΔNPyl(8)}_{CGA} pair and the AfTyrRS(p-I-Phe)/AftRNA^{Tyr(A01)}_{CUA} pair (30) (which direct the incorporation of N^{ε}-(carbobenzyloxy)-L-lysine (CbzK) into TCG and (S)-2-Amino-3-(4-iodophenyl)propanoic acid (p-I-Phe) into TAG, respectively)—were provided with CbzK and p-I-Phe. Cells also contained Ub_{11TCG,65TAG} (TCG/TAG) or Ub9_{TCG,11TCG,14TAG,65TAG} (2×TCG/2×TAG), or wt Ub, which contains no target codons. Expression of ubiquitin-His₆ was performed in the absence (−) or presence (+) of the ncAAs. Full-length ubiquitin-His₆ was detected in cell lysate from an equal number of cells with an anti-His₆ antibody.

[0135] (C) ESI-MS analyses of purified Ub-(11CbzK, 65p-I-Phe) (black trace) and Ub-(11CbzK, 14CbzK, 57p-I-Phe, 65p-I-Phe) (grey trace), expressed in the presence of CbzK and p-I-Phe, as described in panel (E) and purified by Ni²⁺-NTA chromatography. These data confirm the quantitative incorporation of CbzK and p-I-Phe in response to TCG and TAG codons, respectively. Ub-(11CbzK, 65p-I-Phe), theoretical mass: 9707.81 Da; measured mass: 9707.40 Da. Ub-(11CbzK, 14CbzK, 57p-I-Phe, 65p-I-Phe), theoretical mass: 10055.00 Da; measured mass: 10055.60 Da.

[0136] (D) The incorporation of three distinct non-canonical amino acids into TCG, TCA and TAG codons in a single gene. Syn61Δ3(ev4)—containing the 1R26PylRS(CbzK)/AlvtRNA^{ΔNPyl(8)}_{CGA} pair, the MmPylRS/MmtRNA^{Pyl}_{UGA} pair and the AfTyrRS(p-I-Phe)/AftRNA^{Tyr(A01)}_{CUA} pair—were provided with CbzK, BocK and p-I-Phe. Cells also contained Ub_{9TAG,11TCG,14TCA} (TCG/TCA/TAG). Expression of this gene was performed in the absence (−) or presence (+) of the ncAAs. Full-length Ub-(9p-I-Phe, 11 CbzK, 14BocK)-His₆ was detected in cell lysate from an equal number of cells with an anti-His₆ antibody. (E) ESI-MS of purified Ub-(9p-I-Phe, 11CbzK, 14BocK), theoretical mass: 9820.97 Da; measured mass: 9820.80 Da. Western blot experiments (panels (B) and (D)) were performed in 5 biological replicates with similar results. The ESI-MS data (panels (C) and (E)) was collected once.

[0137] FIG. 5. Programmable, encoded synthesis of non-canonical heteropolymers and macrocycles

[0138] (A) Elementary steps in the ribosomal polymerization of two distinct ncAA monomers (labelled A (dark blue) and B (green)). All linear heteropolymer sequences composed of A and B can be encoded from these four elementary steps.

[0139] (B) Encoding heteropolymer sequences (non-canonical monomers are shown as stars). The sequence of monomers in the heteropolymer is programmed by the sequence of codons written by the user. The identity of monomers (A and B) is defined by the aminoacyl-tRNA synthetase/tRNA pairs added to the cell. Cells can be reprogrammed to encode different heteropolymer sequences from a single DNA sequence. Sequences were encoded as insertions at position 3 of sfGFP-His6. Reassignment scheme 1 (r.s.1) uses the MmPylRS/MmtRNA^{Pyl}_{CGA} pair to assign AllocK as monomer A and the 1R26PylRS(CbzK)/AlvtRNA^{ΔNPyl(8)}_{CUA} pair to assign CbzK as monomer B (Fig. S7, D to E). r.s.2 uses the MmPylRS/MmtRNA^{Pyl}_{CGA} pair to assign BocK as monomer A and an AfTyrRS(p-I-Phe)/AftRNA^{Tyr(A01)}_{CUA} pair to assign p-I-Phe as monomer B. r.s.3 uses the 1R26PylRS(CbzK)/AlvtRNA^{ΔNPyl(8)}_{CGA} pair to assign CbzK as monomer A and the AfTyrRS(p-I-Phe)/AftRNA^{Tyr(A01)}_{CUA} pair to assign p-I-Phe as monomer B.

[0140] (C-E) Polymerization of the encoded sequence composed of the indicated ncAAs, and the resulting sfGFP-His6 expression in Syn61Δ3(ev5) were dependent on the addition of both ncAAs to the medium.

[0141] (F) Electrospray ionization (ESI) MS of purified sfGFP-His6 variants containing the indicated ncAA hexamers. BocK/p-I-Phe (expected mass after loss of N-terminal methionine: 29172.07 Da; observed: 29171.8 Da), CbzK/p-I-Phe (expected mass after loss of N-terminal methionine: 29274.13 Da; observed: 29274.0 Da) and AllocK/CbzK (expected mass after loss of N-terminal methionine: 29091.64 Da; observed: 29092.2 Da). The ESI-MS data was collected once.

[0142] (G) Encoded synthesis of free non-canonical polymers. DNA sequences encoding a tetramer and a hexamer were inserted between SUMO and a GyrA intein coupled to a chitin-binding domain (CBD), in Syn61Δ3(ev5) cells containing the same pairs as in r.s.1 (B). Expression of the constructs, followed by Ulp1 cleavage and GyrA trans-thioesterification cleavage, results in the isolation of free non-canonical tetramer and hexamer polymers. Adding an additional cysteine immediately upstream of the polymer sequence results in self-cleavage and release of a macrocyclic non-canonical polymer.

[0143] (H-J) Chemical structures and ESI-MS spectra of the purified linear and cyclic AllocK/CbzK heteropolymers. The raw ESI-MS spectra show the relative intensity and observed m/z ratios for the different non-canonical peptides. The observed masses corresponding to the expected [M+H]⁺ or [M+2H]²⁺ ions are highlighted in bold. Other adducts and fragment ions are labelled relative to these.

[0144] FIG. 6 (S1). Syn61 strain evolution and knockouts.

[0145] (A) Schematic of automated parallel evolution. Clonal cultures are shown in pale yellow; mutagenized populations in each well are represented by distinct shades. Mutator cultures were grown for 17-70 generations with induced random mutagenesis followed by six cycles of dynamic parallel selection on a robotics platform. Regular assessment of optical density (OD₆₀₀) and re-dilution of all wells when 3 wells reach an OD₆₀₀ of 0.5 enables continuous growth in exponential phase for approximately 52 generations. Finally, single colonies are isolated from mutagenized populations and characterized by growth measurement and whole genome sequencing. Figure adapted from Schmied et al. (17) with permission. (B) Lineage of Syn61 and Syn61Δ3 descendants isolated from evolved pools. Colored blocks represent individual clones isolated from independently evolved pools after each round, underlined clones were selected for subsequent rounds of evolution. Grey blocks represent clones that were characterized by growth, with some sequenced (C02.6, C04.7, A11.3, E7.2) but not considered for further ORF mutation analysis in Fig. S2. A list with all mutations identified in sequencing analyses of the evolved strains is provided in Data file S1. The 16 additional clones not indicated for round 1 with Syn61Δ3 are G5.2, F8.2, A11.1, F11.3, E10.1, F11.10, F5.2, G8.1, D1.2, D11.1, F11.8, F11.2, D8.4, A9.1, F8.1, F11.6.

[0146] (C) Schematic of strain development from Syn61 to Syn61Δ3(ev5). The codons that encode serine and protein termination are connected to the anticodons of the tRNAs or release factors predicted to decode them by black lines; all sequences are written 5′ to 3′. The genes encoding the corresponding tRNAs and release factors are indicated in the black boxes. The inventors performed automated parallel mutagenesis and dynamic selection to create a faster growing version of Syn61, Syn61(ev1). This strain was then further evolved to Syn61(ev2). Mutations gained in each strain are separated as mutations in open reading frames (ORFs), non-coding mutations and mutations in intergenic regions. For a detailed list of all mutations gained in the strain development see Data file S1. Targeted deletion of serT, serU, and prfA created Syn61Δ3. In this process the inventors observed rearrangements at 2 loci: i) the collapse of a CRISPR array leading to a 429 bp deletion and ii) the partial replacement of ribosomal operon rrnC with a duplicated segment from the highly homologous ribosomal operon rrnB. The corresponding changes relative to wt Syn61 amount to 19 mutations. After three more subsequent rounds of evolution, the inventors isolated Syn61Δ3(ev3), Syn61Δ3(ev4), and Syn61Δ3(ev5), respectively.

[0147] (D) Growth rates of four clones isolated with increased growth rate after one round of Syn61 evolution with mutagenesis for ˜17 generations. Two out of 96 parallel evolved pools (C02 and C04) yielded clones with improved growth. Sequences of clones derived from the same pool (C02.5 and C02.7 or C04.7 and C04.4) were nearly identical, thus they were considered clonal. Open reading frames with more than one mutation are listed in Fig. S2. Growth rates were calculated for n=8 replicate cultures for each strain. For statistics, see Methods.

[0148] (E) Growth rates of three clones isolated with increased growth rate after the second round of Syn61 evolution, starting with mutagenesis of C04.4 (Syn61(ev1)) for ˜17 generations. Two out of 96 parallel evolved pools (E10 and A11) yielded clones with improved growth. Growth rates were calculated for n=8 replicate cultures for each strain. For statistics, see Methods.

[0149] (F) Growth rates of 22 clones isolated with increased growth rate after one round of Syn61Δ3 evolution with mutagenesis for ˜70 generations, derived from 11 independent pools. Growth rates were calculated for n=5 replicates or n=1 (denoted with red asterisk) cultures for each strain. For statistics, see Methods.

[0150] (G) Growth rates of 7 clones isolated from independent pools with increased growth rate after the second round of Syn61Δ3 evolution, starting with mutagenesis of F11.9 (Syn61Δ3(ev3)) for ˜45 generations. Growth rates were calculated for n=6 replicate cultures for each strain. For statistics, see Methods.

[0151] (H) Growth rates of 5 clones isolated from independent pools with increased growth rate after the third round of Syn61Δ3 evolution, starting with mutagenesis of E7.4 (Syn61Δ3(ev4)) for ˜60 generations. Growth rates were calculated for n=6 replicate cultures for each strain. For statistics, see Methods.

[0152] (I) The doubling time of the most evolved Syn61 derivative (Syn61Δ3(ev5)) was calculated from growth curves recorded under standard laboratory conditions. Three independent cultures were grown in shake flasks at 37° C. and OD₆₀₀ measurements were taken every 10 minutes during exponential growth. For each independent culture a 60 min window during exponential phase was chosen to calculate an average growth rate of 0.026±5·10⁻⁴ and a doubling time of 38.72±1.02 min for Syn61Δ3(ev5). For statistics, see Methods.

[0153] FIG. 7 (S2). Open reading frames mutated more than once during Syn61 evolution.

[0154] (A) For this analysis the inventors selected 14 clones, one sequenced clone from each pool, denoted with colored blocks in Fig S1B. The inventors identified open reading frames mutated more than once, between Syn61 and Syn61Δ3, in a single strain or evolutionarily related strains. Mutations arising in a single strain or in strains related through evolutionary history may not be independent. For example, a detrimental frameshift mutation introduced in nrdE in E10.4 may mean that additional mutations in nrdE are not selected for or against, as the gene is already inactivated. The inventors observed that on average 2*10⁻⁶ mutations per bp per generation were introduced with induced random mutagenesis. On average we accumulated 87.25 mutations in ORFs within the genome per round of mutagenesis and selection. If each mutation is assumed to be independent, then the probability of finding at least two mutation in the same open reading frame (given 3556 ORFs in E. coli) is 0.65. Therefore, it is not unlikely that these mutations are found in the same ORF by chance. Our data are consistent with their being a wide variety of ways for a recoded strain to improve its fitness. Red asterisks denote detrimental mutations, including premature stop codons and frameshifts due to insertion or deletion of typically 1 bp. Red boxes mark essential genes, green boxes in panel (A) and (B) mark genes affected with one additional mutation during post-knockout evolution. A list with all mutations identified in sequencing analyses of the evolved strains is provided in Data file S1.

[0155] (B) Open reading frames mutated more than once, between Syn61 and Syn61Δ3, in independently derived strains. rrmJ, a 23S rRNA methyltransferase, gained two nonsense mutations during initial evolution of Syn61 within 40 bp of each other (P190L, V203A), in close proximity to a Syn61 recoding event (S197). On average we accumulated 87.25 mutations in ORFs within the genome per round of mutagenesis and selection. If each mutation is assumed to be independent, then the probability of finding at least two mutation in the same open reading frame (given 3556 ORFs in Syn61) is 0.65. Therefore, it is not unlikely that these mutations are found in the same ORF by chance. Overall, there was minimal overlap between the mutations arising in independently evolved strains. Our data are consistent with their being a wide variety of ways for a recoded strain to improve its fitness.

[0156] (C) Open reading frames mutated more than once between Syn61Δ3 and Syn61Δ3(ev5) in a single strain or related strains. parE, an essential gene involved in chromosome segregation, accumulated the overall highest number of mutations. Green boxes in panel (C), (D) and (E) mark genes affected with one additional mutation in a strain derived during Syn61 evolution before knockout of the decoding elements. On average we accumulated 62.3 mutations in ORFs within the genome per round of mutagenesis and selection. If it is assumed that each mutation is independent, then the probability of finding at least two mutation in the same open reading frame (given 3556 ORFs in Syn61) is 0.41. Therefore, it is not unlikely that these mutations are found in the same ORF by chance. Overall, there was minimal overlap between the mutations arising in independently evolved strains. These data are consistent with their being a wide variety of ways for a recoded strain to improve its fitness.

[0157] (D) Open reading frames mutated more than once between Syn61Δ3 and Syn61Δ3(ev5) in independently derived strains within the same evolution round. ORFs affected within the same evolution round in independently evolved strains may indicate a strong evolutionary pressure on the predecessor. Four identical mutations were recorded in topA in all strains derived after round 2. The inventors suspect that the 1 bp deletion occurred after sequencing F11.9 before splitting the strain into separate mutagenesis pools. sbcD and nuoG are the most affected by independent mutations in the initial evolution of Syn61Δ3. Overall, there was minimal overlap between the mutations arising in independently evolved strains, indicating a wide variety of ways for a recoded strain to improve its fitness. On average we accumulated 62.3 mutations in ORFs within the genome per round of mutagenesis and selection. If it is assumed that each mutation is independent, then the probability of finding at least two mutation in the same open reading frame (given 3556 ORFs in Syn61) is 0.41. Therefore, it is not unlikely that these mutations are found in the same ORF by chance. Overall, there was minimal overlap between the mutations arising in independently evolved strains. These data are consistent with their being a wide variety of ways for a recoded strain to improve its fitness.

[0158] (E) Open reading frames mutated more than once between Syn61Δ3 and Syn61Δ3(ev5) in independently derived strains in separate evolution rounds. No more than two mutations emerged independently across rounds of Syn61Δ3 evolution. On average we accumulated 62.3 mutations in ORFs within the genome per round of mutagenesis and selection. If it is assumed that each mutation is independent, then the probability of finding at least two mutation in the same open reading frame (given 3556 ORFs in Syn61) is 0.41. Therefore, it is not unlikely that these mutations are found in the same ORF by chance. Overall, there was minimal overlap between the mutations arising in independently evolved strains. These data are consistent with their being a wide variety of ways for a recoded strain to improve its fitness.

[0159] FIG. 8 (S3). Phage propagation is ablated in Syn61Δ3.

[0160] (A) Relative total phage titer after 4 hours of infection of Syn61 variants (see FIG. 2C). The titer of free and intracellular phage resulting from infection was determined by isolating phage from the cultures, serially diluting the isolate, and using it to infect E. coli MG1655 on plates. Cultures of Syn61Δ3 and gentamycin-treated Syn61(ev2), in which protein synthesis, and therefore phage production, is inhibited, contain the same amount of phage after 4 hours, while Syn61(ev2) and Syn61ΔRF-1 propagate the phage and lead to infection. The shown plates are the indicated dilutions.

[0161] (B) Protein synthesis is ablated in gentamycin-treated cells. A Syn61(ev2) control and Syn61(ev2) treated with gentamycin were grown with ³⁵S-Met/Cys and labeled proteins were visualised by SDS-PAGE and phosphorimaging. Despite exposing the phosphor screen for two weeks, no signal was observed for the gentamycin-treated sample.

[0162] (C) Total titer of T7 phage upon infecting Syn61 and its derivatives. Cultures were infected with phage at MOI=5·10⁻⁵ (multiplicity of infection) and the total titer was monitored over 4 hours.

[0163] (D) T7 efficiently lyses Syn61 variants but not Syn61Δ3. Cultures were infected as in panel (C) and OD₆₀₀ was measured after 4 hours.

[0164] (E) Schematic of the TCG, TCA, and TAG codon density in the genomes of phage λ, P1, T4, and T7, as in FIG. 2B.

[0165] FIG. 9 (S4). MS-MS spectra confirm site-specific non-canonical amino acid (ncAA) incorporation into reporters containing one, two, three or four TCG codons in Syn61Δ3.

[0166] (A) Ub_{11TCG} reporter containing BocK at position 11 (Ub-(11BocK)) (see FIGS. 3, B and C) was purified by Ni²⁺-NTA and subject to trypsin digestion followed by LC/MS-MS analysis (see Methods for full details). The tryptic peptides confirm the site-specific incorporation of BocK into the TCG codon at position 11.

[0167] (B-C) LC/MS-MS analysis of Ub-(11BocK, 65BocK) (see FIGS. 3, D and E), as in (A). The tryptic peptides confirm the site-specific incorporation of BocK into TCG codons at positions 11 (B) and 65 (C).

[0168] (D-E) LC/MS-MS analysis of Ub-(11BocK, 14BocK, 65BocK) (see FIGS. 3, F and G), as in (A). The tryptic peptides confirm the site-specific incorporation of BocK into TCG codons at positions 11, 14 (D) and 65 (E).

[0169] (F-G) LC/MS-MS analysis of Ub-(9BocK, 11BocK, 14BocK, 65BocK) (see FIGS. 3, H and I), as in (A). The tryptic peptide containing residues 9, 11, and 14 (F) was found with the correct parent ion mass which harboured three BocK masses. The fragmentation pattern of this parent ion confirmed the site-specific incorporation of BocK into TCG codons at positions 11 and 14, though there were not enough b- and y-series ions to localize BocK to position 9. (G) The tryptic peptide confirming the site-specific incorporation of BocK into the TCG codon at position 65.

[0170] FIG. 10 (S5). GST-MBP comparison of sense codon and amber codon suppression in Syn61Δ3(ev5).

[0171] Syn61Δ3(ev5) cells harbouring an orthogonal aaRS/tRNA pair and its corresponding ncAA efficiently generate full-length GST-MBP protein in response to a sense codon or amber codon. The inventors co-transformed Syn61Δ3(ev5) cells or MDS42 cells (control) with a plasmid encoding the orthogonal MmPylRS/MmtRNA^{Pyl}_{YYY} pair and a plasmid encoding the cognate GST-XXX-MBP reporter; XXX encodes either a wildtype (wt) codon, a TCG sense codon, or a TAG stop codon, and YYY denotes its cognate anticodon. Following induction for GST-XXX-MBP expression in the absence (−) or presence (+) of BocK (5 mM), expressed protein was pulled down with glutathione sepharose beads. Bound samples were then eluted with reduced glutathione and the resultant full-length GST-MBP or truncated GST products analyzed by SDS-PAGE. For both the TCG sense codon and TAG stop codon in Syn61Δ3(ev5) cells, efficient GST-MBP full-length synthesis was detected only in the presence of BocK (see Data file S4 for yields).

[0172] FIG. 11 (S6). Syn61Δ3(ev4) enables reassignment of nine sense codons to a non-canonical amino acid (ncAA) in an elastin-like polypeptide (ELP).

[0173] (A) Syn61Δ3(ev4) enables multi-site ncAA incorporation into the 9 TCG codons in ELP_{9x(TCG)}. The inventors co-transformed a plasmid encoding the orthogonal MmPylRS/MmtRNA^{Pyl}_{CGA} pair and a plasmid encoding ELP₉ₓ(T_{CG}); this contains nine repeats of the ELP coding sequence, with each repeat containing a TCG codon, and a His₆-tag is encoded at the 3′ end. Each ELP repeat of ‘VPGVGVPGVGVPGXGVPGVGVPGVG’ (SEQ ID NO: 1). The sequence of the plasmid is GenBank accession MW879732, and provided herein as SEQ ID NO: 2) contains 24 canonical amino acids and one ncAA residue (X). In cells transformed with the MmPylRS/MmtRNA^{Pyl}_{CGA} plasmid, ELP_{9x(TCG)} expression was induced in the absence (−) or presence (+) of BocK. The inventors then used an anti-His₆ antibody to monitor for full-length protein (ELP_{9x(BocK)}) production from normalized cell lysates—efficient ELP_{9x(BocK)} synthesis was detected only in the presence of both arabinose (Ara) and BocK. As a comparison for the efficiency of the orthogonal aaRS/tRNA pair, cells were separately transformed with a plasmid encoding EctRNA^{Ala}_{CGA}, a chimeric alanyl tRNA with a CGA anticodon which directs alanine incorporation in response to TCG codons, from which the inventors detected efficient ELP_{9x(Ala)} synthesis in the presence of arabinose (Ara). Western blots were performed in biological replicates three times with similar results.

[0174] (B) ESI-MS of Ni²⁺-NTA purified ELP_{9x(BocK)}-His₆ from the experiment described in (A) confirms the incorporation of BocK into 9 TCG codons. Theoretical mass: 23222.32 Da; measured mass: 23221.80 Da. ESI-MS data was collected once.

[0175] FIG. 12 (S7). Mutual orthogonality of the aaRS/tRNA pairs used for double and triple noncanonical amino acid incorporations.

[0176] (A-C) The aaRs/tRNA pairs used for double and triple distinct non-canonical amino acid incorporations in FIG. 4 and FIG. 5 are mutually orthogonal. Syn61Δ3(ev4)—containing the 1R26PylRS(CbzK)/AlvtRNA^{ΔNPYl(8)}_{CGA} pair, the MmPylRS/MmtRNA^{Pyl}_{UGA} pair and the AfTyrRS(p-I-Phe)/AftRNA^{Tyr(A01)}_{CUA} pair (which direct the incorporation of CbzK into TCG, BocK into TCA and p-I-Phe into TAG, respectively)—was provided with CbzK, BocK and p-IPhe. Cells also contained GFP_{3TCG} (panel A), GFP_{3TCA} (panel B), or GFP_{3TAG} (panel C). Electrospray ionization (ESI) MS analysis of GFP-His₆ purified from cells containing GFP_{3TCG} incorporated CbzK, but not BocK or p-I-Phe. GFP_{3TCA} led to the incorporation of BocK, and GFP_{3TAG} led to incorporation of p-I-Phe.

[0177] (D, E) The MmPylRS/MmtRNA^{Pyl}_{CGA} and 1R26PylRS(CbzK)/AlvtRNA^{ΔNPYl(8)}_{CUA} pairs incorporate distinct ncAAs in response to distinct codons in Syn61Δ3(ev4). The orthogonal aaRS/tRNA pairs MmPylRS/MmtRNA^{Pyl}_{CGA} and 1R26PylRS(CbzK)/AlvtRNA^{ΔNPyl(8)}_{CUA} each incorporate their distinct, cognate ncAA in response to their distinct, cognate codons. In the presence of both MmPylRS/MmtRNA^{Pyl}_{CGA} and 1R26PylRS(CbzK)/AlvtRNA^{ΔNPyl(8)}_{CUA} in Syn61Δ3(ev4) cells harbouring a GFP_{3XXX} reporter plasmid, the inventors expressed GFP in the presence of both AllocK and CbzK (+/+). (D) ESI-MS of Ni²⁺-NTA purified GFP_{3TCG} yielded a mass corresponding to the incorporation of AllocK, and not CbzK, thus demonstrating the orthogonality of MmPylRS/MmtRNA^{Pyl}_{CGA} for its cognate ncAA and cognate codon. (E) ESIMS of Ni²⁺-NTA purified GFP_{3TAG} yielded a mass corresponding to the incorporation of CbzK, and not AllocK, thus demonstrating the orthogonality of the 1R26PylRS(CbzK)/AlvtRNA^{ΔNPyl(8)}_{CUA} pair for its cognate ncAA and cognate codon.

[0178] FIG. 13 (S8). MS-MS spectra confirm the site-specific incorporation of distinct non-canonical amino acids (ncAAs) into double, double-double, and triple ubiquitin reporters in Syn61Δ3(ev4).

[0179] (A, B) Ub-(11CbzK, 65p-I-Phe) double (see FIG. 4B), Ub-(11CbzK, 14CbzK, 57p-I-Phe, 65p-IPhe) double-double (see FIG. 4B), and Ub-(9p-I-Phe, 11CbzK, 14BocK) triple (see FIG. 4D) ncAA incorporations were purified by Ni²⁺-NTA and subjected to LC-MS/MS analyses following trypsin digestion to confirm the site-specific incorporation of distinct ncAAs into distinct sense and stop codons (see Methods for full details). For double distinct ncAA incorporation into the double Ub_{11TCG,65TAG} gene, the purified protein Ub-(11CbzK, 65p-I-Phe) yielded tryptic peptides corresponding to the site-specific incorporation of CbzK into the 11TCG codon (A) and p-I-Phe into the 65TAG codon (B).

[0180] (C, D, E) For double-double distinct ncAA incorporation into the Ub_{11TCG,14TCG,57TAG,65TAG} gene, the purified protein Ub-(11CbzK, 14CbzK, 57p-I-Phe, 65p-I-Phe) yielded tryptic peptides corresponding to the site-specific incorporation of CbzK into the 11 TCG and 14TCG codons (C) as well as p-I-Phe into the 57TAG (D) and 65TAG codons (E).

[0181] (F) For triple distinct ncAA incorporation into the Ub_{9TAG,11TCG,14TCA} gene, the purified protein Ub-(9p-I-Phe, 11CbzK, 14BocK) yielded tryptic peptides corresponding to the site-specific incorporation of p-I-Phe into the 9TAG codon, CbzK into the 11TCG codon, and BocK into the 14TCA codon.

[0182] FIG. 14 (S9). Multiple examples of encoding three distinct non-canonical amino acids into a single protein in Syn61Δ3(ev4).

[0183] (A) Chemical structures of the 8 non-canonical amino acids (ncAAs) used to demonstrate codon reassignment and triple ncAA incorporations in Syn61. The numbers indicate the identity of the ncAAs provided in (B).

[0184] (B) Seven examples of encoding three distinct ncAAs into a single protein in Syn61Δ3(ev4). Cells were transformed with plasmids encoding a His₆-tagged Ub_{9TAG,11TCG,14TCA} (or wt Ub) reporter plus three mutually orthogonal aaRS/tRNA pairs, and expression of the reporter was induced by addition of L-arabinose in the absence (−) or presence (+) of ncAAs. Full-length reporter expression was detected from an equal number of cells, normalized by OD₆₀₀ spectrophotometric measurements, by western blot with an anti-His₆ antibody. For expression of wt Ub and incorporation of CbzK, p-I-Phe and BocK/AllocK/CypK/AlkK (lanes 1-6), cells contained pairs 1R26PylRS(CbzK)/AlvtRNA^{ΔNPyl(8)}_{CGA}, AfTyrRS(p-I-Phe)/AftRNA^{Tyr(A01)}_{CUA} and MmPylRS/MmtRNA^{Pyl}_{UGA}. For incorporation of AllocK, 3-Nitro-Tyr and CbzK (lanes 7 and 8), cells contained pairs MmPylRS/MmtRNA^{Pyl}_{CGA}, MjTyrRS(3-Nitro-Tyr)/MjtRNA^{Tyr}_{CUA} (from ref (39)) and 1R26PylRS(CbzK)/AlvtRNA^{ΔNPyl(8)}_{UGA}. For incorporation of p-Az-Phe, CbzK and AllocK/AlkK (lanes 9-11), cells contained pairs MmPylRS/MmtRNA^{Pyl}_{CGA}, MjTyrRS(p-Az-Phe)/MjtRNA^{Tyr}_{CUA} (from ref (40)) and 1R26PylRS(CbzK)/AlvtRNA^{ΔNPYl(8)}_{UGA}. In all cases, expression of Ub_{9TAG,11TCG,14TCA} was dependent on provision of the three cognate ncAAs.

[0185] (C) The inventors purified Ub-His₆ reporters with Ni²⁺-NTA beads in Syn61Δ3(ev4) (see Methods) and performed ESI-MS analyses of the 7 different combinations of unnatural amino acids detailed in (B). Each trace corresponds to a different ubiquitin species, bearing the designated ncAAs at the positions indicated by the numbers. Ub(9p-I-Phe, 11CbzK, 14BocK) theoretical mass: 9820.97 Da; observed mass: 9820.8 Da—the −100 Da peak corresponds to loss of the tertbutoxycarbonyl in BocK. Ub(9p-I-Phe, 11CbzK, 14AllocK) theoretical mass: 9804.94 Da; observed mass: 9805.0 Da. Ub(9p-I-Phe, 11CbzK, 14CypK) theoretical mass: 9830.97 Da; observed mass: 9830.8 Da. Ub(9p-I-Phe, 11CbzK, 14AlkK) theoretical mass: 9802.88 Da; observed mass: 9803.0 Da. Ub(9(3-Nitro-Tyr), 11AllocK, 14CbzK) theoretical mass: 9740.09 Da; observed mass: 9740.0 Da. Ub(9p-Az-Phe, 11AllocK, 14CbzK) theoretical mass: 9720.09 Da; observed mass: 9720.2 Da. Ub(9p-Az-Phe, 11AlkK, 14CbzK) theoretical mass: 9717.99 Da; observed mass: 9718.6 Da. The ESI-MS data was collected once. See Fig. S10 for further confirmation of triple ncAA incorporation in response to the target codons. See Data file S4 for yields.

[0186] FIG. 15 (S10). MS-MS spectra from six additional triple distinct non-canonical amino acid (ncAA) combinations confirm the site-specific incorporation of the intended three ncAAs into Ub_{9TAG,11TCG,14TCA} reporters.

[0187] (A) To encode three distinct ncAA incorporations into the Ub_{9TAG,11TCG,14TCA} gene, the inventors expressed three orthogonal aaRS/tRNA pairs and added the corresponding three ncAAs to Syn61Δ3(ev4) cells. Ubiquitin containing ncAAs was purified by Ni²⁺-NTA and subjected to LC/MS-MS analyses following trypsin digestion to confirm the site-specific incorporation of distinct ncAAs into distinct TCG, TCA, and TAG codons (see Methods for full details). To encode the triple ncAA combination of p-I-Phe, CbzK, and Allock in response to TAG, TCG, and TCA codons, respectively, the same aaRS/tRNA pairs were used as in FIG. 4D. The purified protein Ub-(9p-IPhe, 11CbzK, 14AllocK) yielded tryptic peptides corresponding to the site-specific incorporation of p-I-Phe into the 9TAG codon, CbzK into the 11TCG codon, and AllocK into the 14TCA codon.

[0188] (B) For the triple ncAA combination incorporating p-I-Phe, CbzK, and CypK in response to the TAG, TCG, and TCA codons, respectively, the same aaRS/tRNA pairs were used as in FIG. 4D. The purified protein Ub-(9p-I-Phe, 11CbzK, 14CypK) yielded a tryptic peptide with the correct parent ion mass containing residues 9(p-I-Phe), 11(CbzK), and 14(CypK). The fragmentation pattern of this parent ion confirmed the site-specific incorporation of CbzK into the 11TCG codon and CypK into the 14TCA codon, though there were not enough b- and y-series ions to localize p-I-Phe to position 9.

[0189] (C) For the triple ncAA combination incorporating p-I-Phe, CbzK, and AlkK in response to the TAG, TCG, and TCA codons, respectively, the same aaRS/tRNA pairs were used as in FIG. 4D. The purified protein Ub-(9p-I-Phe, 11 CbzK, 14AlkK) yielded tryptic peptides corresponding to the site-specific incorporation of p-I-Phe into the 9TAG codon, CbzK into the 11TCG codon, and AlkK into the 14TCA codon.

[0190] (D) For the triple ncAA combination incorporating 3-Nitro-Tyr, AllocK, and CbzK in response to the TAG, TCG, and TCA codons, respectively, the inventors used the orthogonal aaRS/tRNA pairs MmPylRS/MmtRNA^{Pyl}_{CGA}, MjTyrRS(3-Nitro-Tyr)/MjtRNA^{Tyr}_{CUA} (from ref (39)), and 1R26PylRS(CbzK)/AlvtRNA^{ΔNPyl(8)}_{UGA}. The purified protein Ub-(9(3-Nitro-Tyr), 11AllocK, 14CbzK) yielded tryptic peptides corresponding to the site-specific incorporation of 3-Nitro-Tyr into the 9TAG codon, AllocK into the 11TCG codon, and CbzK into the 14TCA codon.

[0191] (E) For the triple ncAA combination incorporating p-Az-Phe, AllocK, and CbzK in response to the TAG, TCG, and TCA codons, respectively, the inventors used the orthogonal aaRS/tRNA pairs MmPylRS/MmtRNA^{Pyl}_{CGA}, MjTyrRS(p-Az-Phe)/MjtRNA^{Tyr}_{CUA} (from ref (40)), and 1R26PylRS(CbzK)/AlvtRNA^{ΔNPyl(8)}_{UGA}. The purified protein Ub-(9p-Az-Phe, 11AllocK, 14CbzK) yielded tryptic peptides corresponding to the site-specific incorporation of p-Az-Phe into the 9TAG codon, AllocK into the 11TCG codon, and CbzK into the 14TCA codon.

[0192] (F) For the triple ncAA combination incorporating p-Az-Phe, AlkK, and CbzK in response to the TAG, TCG, and TCA codons, respectively, the same orthogonal aaRS/tRNA pairs were used as in panel (E). The purified protein Ub-(9p-Az-Phe, 11 AllocK, 14CbzK) yielded tryptic peptides corresponding to the site-specific incorporation of p-Az-Phe into the 9TAG codon, AlkK into the 11TCG codon, and CbzK into the 14TCA codon.

[0193] FIG. 16 (S11). Encoded cellular synthesis of non-canonical elementary steps and heterotetramers.

[0194] (A) Elementary steps required for the synthesis of heteropolymer sequences made of BocK and p-I-Phe, encoded as insertions at position 3 of GFP. BocK (monomer A) and p-I-Phe (monomer B) are directed to TCG and TAG codons respectively, using pairs MmPylRS/MmtRNA^{Pyl}_{CGA} and AfTyrRS(p-I-Phe)/AftRNA^{Tyr(A01)}_{CUA} as in reassignment scheme 2 (r.s.2) in FIG. 5B. Polymerization and sfGFP expression were dependent on the addition of ncAAs to the medium.

[0195] (B) Encoding elementary steps made of CbzK and p-I-Phe, directed to TCG and TAG respectively using pairs 1R26PylRS(CbzK)/AlvtRNA^{ΔNPyl(8)}_{CGA} and AfTyrRS(p-I-Phe)/AftRNA^{Tyr(A01)}_{CUA} as in reassignment scheme 3 (r.s.3) in FIG. 5B.

[0196] (C) Encoding elementary steps made of AllocK and CbzK, directed to TCG and TAG respectively using pairs MmPylRS/MmtRNA^{Pyl}_{CGA} and 1R26PylRS(CbzK)/AlvtRNA^{ΔNPyl(8)}_{CUA} as in reassignment scheme 1 (r.s.1) in FIG. 5B.

[0197] (D) Schematic of genetic encoding of heterotetramer sequences with TCG and TAG codons, as in FIG. 5.

[0198] (E) Encoding tetramers made of BocK and p-I-Phe, directed to TCG and TAG respectively using pairs MmPylRS/MmtRNA^{Pyl}_{CGA} and AfTyrRS(p-I-Phe)/AftRNA^{Tyr(A01)}_{CUA} as in reassignment scheme 2 (r.s.2) in FIG. 5B.

[0199] (F) Encoding tetramers made of CbzK and p-I-Phe, directed to TCG and TAG respectively using pairs 1R26PylRS(CbzK)/AlvtRNA^{ΔNPyl(8)}_{CGA} and AfTyrRS(p-I-Phe)/AftRNA^{Tyr(A01)}_{CUA} as in reassignment scheme 3 (r.s.3) in FIG. 5B.

[0200] (G) Encoding tetramers made of AllocK and CbzK, directed to TCG and TAG respectively using pairs MmPylRS/MmtRNA^{Pyl}_{CGA} and 1R26PylRS(CbzK)/AlvtRNA^{ΔNPyl(8)}_{CUA} as in reassignment scheme 1 (r.s.1) in FIG. 5B.

[0201] FIG. 17 (S12). Encoded cellular synthesis of a non-canonical heterooctamer.

[0202] (A) Encoding a heterooctamer made of AllocK and CbzK, directed to TCG and TAG respectively using pairs MmPylRS/MmtRNA^{Pyl}_{CGA} and 1R26PylRS(CbzK)/AlvtRNA^{ΔNPyl(8)}_{CUA} as in reassignment scheme 1 (r.s.1) in FIG. 5B, synthesized as an insertion at position 3 of sfGFP.

[0203] (B) Polymerization of the encoded sequence composed of AllocK and CbzK, and the resulting sfGFP-His6 expression were dependent on the addition of both ncAAs to the medium.

[0204] (C) Electrospray ionization (ESI) MS of purified sfGFP-(3AllocK, 4CbzK, 5AllocK, 6CbzK, 7AllocK, 8CbzK, 9AllocK, 10CbzK) containing the indicated set of eight contiguous ncAAs. Expected mass after loss of N-terminal methionine and acetylation: 29608.28 Da; observed mass: 29607.60 Da. The ESI-MS data was collected twice.

[0205] FIG. 18 (S13). Excision of linear and cyclic non-canonical heteropolymers.

[0206] The heteropolymer is encoded and expressed in between His₆-SUMO and a GyrA intein (41)-CBD fusion, and the addition of cysteine after SUMO enables self-cyclisation. In a single step, the peptide is excised or cyclized through addition of Ulp1 and DTT. The Ulp1 rapidly removes the N-terminal SUMO, while the C-terminal GyrA intein is cleaved through transthioesterification by DTT or the N-terminal cysteine. The liberated heteropolymers can be purified from the reaction on a C18 column or, if insoluble, can be separated by centrifugation and extracted with hot, acidic methanol. The cyclisation is irreversible through the formation of a peptide bond by an N→S acyl shift, while the DTT thioester hydrolyses.

[0207] FIG. 19. RF1-mediated (ΔRF1) resistance against lambda phage is reversed upon KO of ssrA. On the contrary, lambda phage resistance in triple knockout (Δ3) cells is not reduced by ΔssrA.

[0208] FIG. 20. Provides a sequence alignment of various aaRS. “*” indicates residues found in all aligned aaRS sequences, “:” indicates residues within strong similarity between the aligned sequences, and “.” indicates residues within some similarity between the aligned sequences. Mm is Methanosarcina mazei; Mb is Methanosarcina barkeri; 1R26 is Methanomethylophilus sp. 1R26; Lum 1 is Methanomassiliicoccus luminyensis 1; Nitro is Nitrososphaeria archaeon; Tron is Methanonatronarchaeum thermophilum; Gemm is Gemmatimonadetes bacterium; PGA8 is Peptostreptococcaceae bacterium pGA-8; I2 is Desulfosporosinus sp. I2; Clos is Clostridiales bacterium; D121 is a Deltaproteobacteria bacterium; and D416 is another Deltaproteobacteria.

### DETAILED DESCRIPTION

[0209] The inventors demonstrate herein that it is possible to remove a first endogenous tRNA and a second endogenous tRNA from a prokaryotic cell, e.g. by deletion of the endogenous genes, to result in a viable cell.

[0210] Thus, in a first aspect of the invention, there is provided a prokaryotic cell wherein: the prokaryotic cell does not express a first endogenous tRNA and a second endogenous tRNA; and the prokaryotic cell comprises a genome wherein a first type of sense codon and a second type of sense codon have been recoded such that the first endogenous tRNA and the second endogenous tRNA are dispensable.

[0211] An endogenous tRNA is considered to be not expressed if the endogenous tRNA is not present in a form that would allow it to decode its cognate codon(s). Thus, an endogenous tRNA may be removed using any manner that would prevent the production of a functional form of the endogenous tRNA within the prokaryotic cell. For instance, the endogenous gene may be deleted or a portion of the gene may be deleted to prevent expression. Regulatory sequences may be deleted or altered to prevent expression. Alternatively, nonsense, frameshift, or missense mutations may prevent expression of the tRNA in a functional form.

[0212] The removals of the endogenous tRNAs are performed in prokaryotic cells wherein the genomes have been recoded to remove occurrences of particular types of sense codon. “Recoding” as used herein, is the replacement of an occurrence of a type of codon with a different codon, such that the occurrence of the codon is removed from the genome. The recoded sense codon may be replaced with a synonymous codon to result in different codon usage without changing the encoded polypeptide. Alternatively, the sense codon may be replaced with a non-synonymous codon, for instance if the alteration in the sequence of the encoded polypeptide does not affect viability. The deleted endogenous tRNAs are those that are dispensable in light of the recoding. “Dispensable” as used herein, means not required for viability of the prokaryotic cell.

[0213] Viable prokaryotic cells are cells that are capable of being metabolically active. In a particular embodiment, the viable prokaryotic cell of the invention may be capable of growth when cultured in an appropriate media and under appropriate conditions for the particular species or strain. Such prokaryotic cells may be referred to as capable of being cultured. As an example, if the prokaryotic cell is a bacterial cell such as E. coli, the assessment of viability may be performed by culturing said bacteria in a medium comprising LB medium, or on an agar comprising LB agar, at 37° C. The medium or agar may be supplemented with 2% glucose. Growth of the bacteria may be monitored using standard approaches, such as measurement of the OD₆₀₀. Alternative approaches, or approaches adapted to particular prokaryotic cells, bacteria strains, bacterial species, or in light of the inclusion of marker genes, are known to the skilled person.

[0214] A tRNA that decodes one or more sense codons that have been replaced (or deleted) may be deleted and the prokaryotic cell will remain viable if the tRNA decodes only the one or more sense codons that have been replaced (or deleted); or alternatively if the tRNA decodes one or more sense codons that have been replaced (or deleted) and one or more sense codons that have not been replaced (or deleted), if the tRNA is dispensable for the one or more sense codons that have not been replaced (or deleted) (i.e. the one or remaining sense codons which the tRNA decodes are decoded by one or more alternative tRNAs). For example, if the genome of the prokaryotic cell lacks TCA sense codons, serT, encoding tRNA^{Ser}_{UGA}, may be deleted and/or if the genome lacks TCG sense codons, serU, encoding tRNA^{Ser}_{CGA}, may be deleted. Thus, in an embodiment, the prokaryotic cell expresses neither tRNA^{Ser}_{UGA} nor tRNA^{Ser}_{CGA}.

[0215] The number of occurrences of the first and second type of sense codon that are recoded is adequate to enable the removal of the cognate tRNAs corresponding to said sense codons while maintaining viability of the prokaryotic cell. For example, this may be achieved by removing all of the occurrences of the first and second type of sense codon from the essential genes. A gene is “essential”, as used herein, if the product of the gene is required for viability of the prokaryotic cell. For instance, if the prevention of expression of a functional form of a protein encoded by a gene would result in non-viability of the prokaryotic cell, then the gene is considered essential. In particular, a gene is considered essential if a “blank” codon (i.e. a codon for which the cell contains no corresponding tRNA or release factor) within the gene results in a loss of cell viability. Therefore, in an embodiment, all of the genes of the prokaryotic cell for which a blank codon could not be tolerated without a loss of viability are recoded, but genes that are able to tolerate blank codons may not be recoded. Thus, the skilled person can assess whether all of the essential genes have been recoded by assessing whether a cognate tRNA is dispensable.

[0216] In a particular embodiment, there is provided a prokaryotic cell, wherein: the prokaryotic cell does not express a first endogenous tRNA and a second endogenous tRNA; the essential genes of the prokaryotic cell do not contain occurrences of a first type of sense codon, and the first endogenous tRNA is a cognate tRNA for the first type of sense codon; and the essential genes of the prokaryotic cell do not contain occurrences of a second type of sense codon, and the second endogenous tRNA is a cognate tRNA for the second type of sense codon.

[0217] In particular embodiments, the genome comprises 100 or more, 200 or more, or 300 or more essential genes with no occurrences of the first and/or second type of sense codon. For instance, all or substantially all of the essential genes in the genome may comprise no occurrences of the first and/or second type of sense codon.

[0218] In some embodiments, the essential genes may be selected from one or more of the list consisting of: ribF, ispA, ispH, dapB, folA, imp, yabQ, ftsL, ftsI, murE, murF, mraY, murD, ftsW, murG, murC, ftsQ, ftsA, ftsZ, lpxC, secM, secA, can, folK, hemL, yadR, dapD, map, rpsB, tsf, pyrH, frr, dxr, ispU, cdsA, yaeL, yaeT, lpxD, fabZ, lpxA, lpxB, dnaE, accA, tilS, proS, yafF, hemB, secD, secF, ribD, ribE, thiL, dxs, ispA, dnaX, adk, hemH, lpxH, cysS, folD, entD, mrdB, mrdA, nadD, holA, rlpB, leuS, lnt, glnS, fldA, cydA, infA, cydC, ftsK, lolA, serS, rpsA, msbA, lpxK, kdsB, mukF, mukE, mukB, asnS, fabA, mviN, rne, fabD, fabG, acpP, tmk, holB, lolC, olD, lolE, purB, minE, minD, pth, prsA, ispE, lolB, hemA, prfA, prmC, kdsA, topA, ribA, fabI, tyrS, ribC, ydiL, pheT, pheS, rplT, infC, thrS, nadE, gapA, yeaZ, aspS, argS, pgsA, yejM, metG, folE, yejM, gyrA, nrdA, nrdB, folC, accD, fabB, gltX, ligA, zipA, dapE, dapA, der, hisS, ispG, suhB, tadA, acpS, era, rnc, lepB, rpoE, pssA, yfiO, rplS, trmD, rpsP, ffh, grpE, csrA, ispF, ispD, ftsB, eno, pyrG, chpR, lgt, fbaA, pgk, yqgD, metK, yqgF, plsC, ygiT, parE, ribB, cca, ygjD, tdcF, yraL, yhbV, infB, nusA, ftsH, obgE, rpmA, rplU, ispB, murA, yrbB, yrbK, yhbN, rpsI, rplM, degS, mreD, mreC, mreB, accB, accC, yrdC, def fint, rplQ, rpoA, rpsD, rpsK, rpsM, secY, rplO, rpmD, rpsE, rplR, rplF, rpsH, rpsN, rplE, rplX, rplN, rpsQ, rpmC, rplP, rpsC, rplV, rpsS, rplB, rplW, rplD, rplC, rpsJ, fusA, rpsG, rpsL, trpS, yrfF, asd, rpoH, ftsX ftsE, ftsY, yhhQ, bcsB, glyQ, gpsA, rfaK, kdtA, coaD, rpmB, dfp, dut, gmk, spoT, gyrB, dnaN, dnaA, rpmH, rnpA, yidC, tnaB, glmS, glmU, wzyE, hemD, hemC, yigP, ubiB, ubiD, hemG, yihA, ftsN, murI, murB, birA, secE, nusG, rplJ, rplL, rpoB, rpoC, ubiA, plsB, lexA, dnaB, ssb, alsK, groS, psd, orn, yjeE, rpsR, chpS, ppa, valS, yjgP, yjgQ, and dnaC.

[0219] In particular, the essential genes may be selected from one or more of the list consisting of: ribF, ispA, ispH, dapB, folA, imp, yabQ, lpxC, secM, secA, can, folK, hemL, yadR, dapD, map, rpsB, tsf, pyrH, frr, dxr, ispU, cdsA, yaeL, yaeT, lpxD, fabZ, lpxA, lpxB, dnaE, accA, tilS, proS, yafF, hemB, secD, secF, ribD, ribE, thiL, dxs, ispA, dnaX, adk, hemH, lpxH, cysS, folD, entD, mrdB, mrdA, nadD, holA, rlpB, leuS, lnt, glnS, fldA, cydA, infA, cydC, ftsK, lolA, serS, rpsA, msbA, bpxK, kdsB, mukF, mukE, mukB, asnS, fabA, mviN, rne, fabD, fabG, acpP, tmk, holB, iolC, bolD, bolE, purB, minE, minD, pth, prsA, ispE, lolB, hemA, prfA, prmC, kdsA, topA, ribA, fabI, tyrS, ribC, ydiL, pheT, pheS, rplT, infC, thrS, nadE, gapA, yeaZ, aspS, argS, pgsA, yejM, metG, folE, yejM, gyrA, nrdA, nrdB, folC, accD, fabB, gltX, higA, zipA, dapE, dapA, der, hisS, ispG, suhB, tadA, acpS, era, rnc, lepB, rpoE, pssA, yfiO, rplS, trmD, rpsP, ffh, grpE, csrA, ispF, ispD, ftsB, eno, pyrG, chpR, lgt, fbaA, pgk, yqgD, metK, yqgF, plsC, ygiT, parE, ribB, cca, ygjD, tdcF, yraL, yhbV, infB, nusA, ftsH, obgE, rpmA, rplU, ispB, murA, yrbB, yrbK, yhbN, rpsI, rplM, degS, mreD, mreC, mreB, accB, accC, yrdC, def fint, rplQ, rpoA, rpsD, rpsK, rpsM, secY, rplO, rpmD, rpsE, rplR, rplF, rpsH, rpsN, rplE, rplX rplN, rpsQ, rpmC, rplP, rpsC, rplV, rpsS, rplB, rplW, rplD, rplC, rpsJ, fusA, rpsG, rpsL, trpS, yrfF, asd, rpoH, ftsX ftsE, ftsY, yhhQ, bcsB, glyQ, gpsA, rfaK, kdtA, coaD, rpmB, dfp, dut, gmk, spoT, gyrB, dnaN, dnaA, rpmH, rnpA, yidC, tnaB, glmS, glmU, wzyE, hemD, hemC, yigP, ubiB, ubiD, hemG, yihA, ftsN, murI, murB, birA, secE, nusG, rplJ, rplL, rpoB, rpoC, ubiA, plsB, lexA, dnaB, ssb, alsK, groS, psd, orn, yjeE, rpsR, chpS, ppa, valS, yjgP, yjgQ, and dnaC.

[0220] In other embodiments, the prokaryotic cell of the present invention may comprise a genome comprising 5 or fewer occurrences of the first and/or second type of sense codon. The genome may be derived from a parent genome and may comprise less than 10%, 5%, 2%, 1%, 0.5%, 0.1% of the occurrences of the first and/or second type of sense codon, relative to the parent genome. The genome may comprise 100 or more, 200 or more, or 1000 or more genes with no occurrences of the first and/or second type of sense codon. In particular, all or substantially all the genes in the genome may have no occurrences of the first and/or second type of sense codon.

[0221] Thus, in a particular embodiment, there is provided a prokaryotic cell, wherein: the prokaryotic cell does not express a first endogenous tRNA and a second endogenous tRNA; the genome of the prokaryotic cell comprises 5, 4, 3, 2, 1, or no occurrences of a first type of sense codon, and the first endogenous tRNA is a cognate tRNA for the first type of sense codon; and the genome of the prokaryotic cell comprises 5, 4, 3, 2, 1, or no occurrences of a second type of sense codon, and the second endogenous tRNA is a cognate tRNA for the second type of sense codon.

[0222] In a particular embodiment, the genome comprises no occurrences of the first type of sense codon and no occurrences of the second type of sense codon.

[0223] The genome may be derived from a parent genome and comprise 5 or fewer (e.g. 5, 4, 3, 2, 1), or no occurrences of native sense codons of the first and/or second type. In a particular embodiment, the genome is derived from a parent genome and comprises no occurrences of native sense codons of the first and the second type.

[0224] In some embodiments the genome comprises 100 or more, 200 or more, 300 or more, 400 or more, 500 or more, 600 or more, 700 or more, 800 or more, 900 or more, 1000 or more, 1500 or more, or 2000 or more recoded genes. In some embodiments the genes are those for which there is evidence of translation and/or of the predicted protein product. For example, the genome may comprise 100 or more, 200 or more, 300 or more, 400 or more, 500 or more 600 or more, 700 or more, 800 or more, 900 or more, 1000 or more, 1500 or more, or 2000 or more recoded genes for which there is evidence of translation and/or of the predicted protein product.

[0225] In an embodiment, all annotated open reading frames within the genome have no occurrences of the sense codons of the first and the second type. The prokaryotic cell of the invention may be a bacterial cell, preferably E. coli, and the genome of the E. coli may contain no occurrences of a first and a second type of sense codon as annotated in GenBank accession number CP040347.1.

[0226] In a particular embodiment, the protein-encoding genes have no occurrences of the sense codons of the first and the second type. In particular embodiments, no proteins are translated from any of the remaining occurrences of the first and/or second type of sense codon and/or genes comprising the remaining occurrences of the first and/or second type of sense codons are putative or are non-coding genes. In some embodiments the translation of the genes comprising the remaining occurrences of the first and/or second type of sense codons is reduced and/or prevented (e.g. the genes may comprise stop codons in the 5′ sequence).

[0227] Any remaining occurrences of the sense codons may be necessary to ensure that the genome is viable. For example, one or more, in particular all, of the remaining occurrences of the first and/or second type of sense codons in the genome may be present in the regulatory elements of essential genes; and/or one or more, in particular all, of the remaining occurrences of the first and/or second type of sense codons may be in genes in which there is no evidence for translation or the predicted protein product (i.e. putative or non-coding genes).

[0228] As used herein, a “sense codon” is a nucleotide triplet that codes for an amino acid. Thus, sense codons may be identified in a genome by gene prediction, i.e. by identifying regions of the genome that code for proteins (i.e. genes) and the corresponding open reading frames (ORFs). Typically, genomes naturally comprise 61 sense codons: GCT, GCC, GCA, GCG, CGT, CGC, CGA, CGG, AGA, AGG, AAT, AAC, GAT, GAC, TGT, TGC, CAA, CAG, GAA, GAG, GGT, GGC, GGA, GGG, CAT, CAC, ATT, ATC, ATA, TTA, TTG, CTT, CTC, CTA, CTG, AAA, AAG, ATG, TTT, TTC, CCT, CCC, CCA, CCG, TCT, TCC, TCA, TCG, AGT, AGC, ACT, ACC, ACA, ACG, TGG, TAT, TAC, GTT, GTC, GTA, and GTG (read from 5′ to 3′ on the coding strand of DNA). The standard genetic code encodes the 20 canonical amino acids using the 61 triplet codons. 18 of the 20 amino acids are encoded by more than one synonymous codon. The first or second type of sense codon may be native sense codons, i.e. sense codons which are present in the parent genome.

[0229] The 61 sense codons in DNA are transcribed into corresponding mRNA and subsequently decoded by one or more tRNAs. tRNAs carry an amino acid to a ribosome as directed by the sense codons in the mRNA. The tRNAs can recognise one or more sense codons via a complementary anticodon. A sequence of sense codons is subsequently translated into a polypeptide (i.e. a sequence of amino acids). Codon and anticodon interactions in the E. coli genome are shown in FIG. 17 of WO2020/229592 (incorporated herein by reference).

[0230] The genome wide removal of the first and/or second type of sense codon, but not other sense codons, enables cognate tRNAs corresponding to said first or second type of sense codons to be deleted without removing the ability to decode the sense codons remaining in the genome.

[0231] Aminoacyl-tRNA synthetases for serine do not recognise the anticodons of their cognate tRNAs. This may facilitate the assignment of codons to new amino acids through the introduction of tRNAs bearing cognate anticodons that do not direct mis-aminoacylation by endogenous synthetases. Thus, the recoded sense codons may be selected from: TCG, TCA, TCT, TCC, AGT, or AGC. In a particular embodiment, the first and second type of sense codon are TCA and TCG.

[0232] To achieve removal of sense codons they may be replaced with synonymous sense codons. This is preferable to ensure that the encoded protein sequence is not changed. For instance, the prokaryotic cell may have a genome wherein 90% or more, 95% or more, 98% or more, 99% or more, 99.5% or more, 99.6% or more, 99.7% or more, 99.8% or more, 99.9% or more, or 100% of the occurrences of the first or second type of sense codons in the parent genome is replaced with synonymous sense codons. The person skilled in the art is able to deduce suitable synonymous sense codon replacements. For example, in E. coli, typically TCG, TCA, TCT, TCC, AGT and AGC all encode serine.

[0233] In some embodiments, the replacement is a defined replacement, i.e. one sense codon is replaced with a single synonymous sense codon. Preferably, 90% or more, 95% or more, 98% or more, 99% or more, 99.5% or more, 99.6% or more, 99.7% or more, 99.8% or more, 99.9% or more, or 100% of the occurrences of the first or second type of sense codon in the parent genome are is replaced with a defined (i.e. single) synonymous sense codon.

[0234] For example, the defined replacement may be: TCG replaced with any one of TCT, TCC, AGT, or AGC; or TCA replaced with any one of TCT, TCC, AGT, or AGC.

[0235] In particular, the replacements are selected from one or more of: TCG to either AGT or AGC; or TCA to either AGT or AGC. In a particular embodiment, TCG is replaced with AGC and TCA is replaced with AGT.

[0236] Preferably, none of these codon replacements affect ribosomal binding sites (AGGAGG), which are highly conserved regulatory sequences in E. coli. The selected codon replacements may be tested on a small test region (e.g. a 20 kb region of the genome rich in both essential target genes and target codons) to assess viability. If the codon replacements are not viable on the small test region they may be disregarded.

[0237] When replacement of sense codons in the parent genome with defined replacement synonymous sense codons does not result in a viable prokaryotic cell, alternative replacement synonymous sense codons may be used. For instance, 99.9% of the occurrences of the first and/or second type of sense codon in the parent genome may be replaced with a defined (i.e. single) synonymous sense codon, and the remaining 0.1% with alternative synonymous sense codons. For example, 99.9% of the occurrences of TCG may be replaced with AGC and 0.1% replaced with TCT, TCC, AGT or AGC; and/or 99.9% of the occurrences of TCA may be replaced with AGT and 0.1% replaced with TCT, TCC, AGT or AGC.

[0238] In some instances, a particular occurrence of a sense codon may not be replaceable with any of the potential synonymous sense codons without affecting viability. To retain viability, the sense codon may be replaced with a non-synonymous sense codon that does not affect viability. For instance, 99.9% of the occurrences of the first and/or second type of sense codon in the parent genome may be replaced with a defined (i.e. single) synonymous sense codon, and the remaining 0.1% with alternative non-synonymous sense codons.

[0239] The inventors have additionally demonstrated that it is possible to remove an endogenous release factor from a prokaryotic cell of the invention while retaining viability, such that the resultant cell does not express at least two endogenous tRNAs and does not express at least one endogenous release factor. Thus, in an embodiment, the prokaryotic cell does not express a first endogenous release factor; and a first type of stop codon has been recoded within the genome of the prokaryotic cell such that the first endogenous release factor is dispensable.

[0240] The removal of the first endogenous release factor may performed in prokaryotic cells wherein the genomes have been recoded to remove occurrences of a first type of stop codon. Optionally the removed stop codons are replaced with synonymous codons. The deleted endogenous release factor is the factor that is dispensable in light of the recoding.

[0241] In a particular embodiment, there is provided a prokaryotic cell, wherein the prokaryotic cell does not express a first endogenous tRNA, a second endogenous tRNA, and a first endogenous release factor; and wherein the genome of the prokaryotic cell has been recoded to remove a plurality of the sense codons for which the first and second endogenous tRNAs are cognate, and to remove a plurality of the stop codon for which the first endogenous release factor is cognate.

[0242] An endogenous release factor is considered to be not expressed if the endogenous release factor is not present in a form that would allow it to decode its cognate codon(s). Thus, an endogenous release factor may be removed using any manner that would prevent the production of a functional form of the endogenous release factor within the prokaryotic cell. For instance, the endogenous gene may be deleted or a portion of the gene may be deleted to prevent expression. Regulatory sequences may be deleted or altered to prevent expression. Alternatively, nonsense, frameshift, or missense mutations may prevent expression of the release factor in a functional form.

[0243] As used herein, a “stop codon” is a nucleotide triplet that codes for termination of translation into proteins. Typically, genomes naturally comprise 3 stop codons: TAA (“ochre”), TGA (“opal” or “umber”) and TAG (“amber”).

[0244] The number of occurrences of the first type of stop codon that are removed is adequate to enable the removal of the cognate release factor corresponding to said stop codons while maintaining viability of the prokaryotic cell.

[0245] Thus, in some embodiments, the essential genes of the prokaryotic cell do not contain occurrences of the first type of stop codon. The essential genes may be any as discussed herein, particularly those discussed in relation to the removal of the first or second type of sense codon. In particular embodiments, the genome comprises 100 or more, 200 or more, or 300 or more essential genes with no occurrences of the first type of stop codon. For instance, all or substantially all of the essential genes in the genome may comprise no occurrences of the first type of stop codon.

[0246] For example, the genome may comprise 100 or more, 200 or more, or 300 or more essential genes with no occurrences of the first type of sense codon, the second type of sense codon, and the first type of stop codon. In particular, all or substantially all of the essential genes in the genome may comprise no occurrences of the first type of sense codon, the second type of sense codon, and the first type of stop codon.

[0247] In some embodiments, the genome comprises 10 or fewer, 5 or fewer, or no occurrences of the first type of stop codon. Such as 5, 4, 3, 2, 1, or no instances of the first type of stop codon.

[0248] In a particular embodiment, wherein the first type of stop codon is TAG and the first endogenous release factor is RF-1. In such embodiments, there may be 10 or fewer, 5 or fewer, or no occurrences of the amber stop codon (TAG). In other examples, 90% or more, 95% or more, 98% or more, 99% or more, or all of the occurrences of TAG in the parent genome are replaced with TAA (the ochre stop codon). In particular embodiments, the genome comprises no occurrences of the amber stop codon (TAG), optionally wherein all of the occurrences of TAG in the parent genome are replaced with TAA (the ochre stop codon).

[0249] In an embodiment, all annotated open reading frames within the genome have no occurrences of the first type of stop codon. The prokaryotic cell of the invention may be a bacterial cell, preferably E. coli, and the genome of the E. coli may contain no occurrences of first type of stop codon as annotated in GenBank accession number CP040347.1.

[0250] In a particular embodiment, the protein-encoding genes have no occurrences of the first type of stop codon. In particular embodiments, no proteins are translated from any of the remaining occurrences of the first type of stop codon and/or genes comprising the remaining occurrences of the first type of stop codon are putative or are non-coding genes. In some embodiments the translation of the genes comprising the remaining occurrences of the first type of stop codon is reduced and/or prevented (e.g. the genes may comprise stop codons in the 5′ sequence).

[0251] Any remaining occurrences of the first type of stop codon may be necessary to ensure that the genome is viable. For example, one or more, in particular all, of the remaining occurrences of the first type of stop codon in the genome may be present in the regulatory elements of essential genes; and/or one or more, in particular all, of the remaining occurrences of the first type of stop codon may be in genes in which there is no evidence for translation or the predicted protein product (i.e. putative or non-coding genes).

[0252] Accordingly, in some embodiments the genome comprises no occurrences of a first and a second type of sense codon, and no occurrences of one stop codon, preferably the amber stop codon (TAG). In particular embodiments the genome comprises no occurrences of the sense codons TCG and TCA, and no occurrences of the amber stop codon (TAG), optionally wherein TCG, TCA and TAG in the parent genome are replaced with synonymous codons, for example 99.9% or more of the occurrences of TCG in the parent genome are replaced with AGC, 99.9% or more of the occurrences of TCA in the parent genome are replaced with AGT and all of the occurrences of TAG in the parent genome are replaced with TAA.

[0253] In a particular embodiment, the genome of the prokaryotic cell has been recoded such that the sense codon TCG has been replaced with AGC, the sense codon TCA has been replaced with AGT, and the stop codon TAG has been replaced with TAA, and wherein sufficient numbers of said codons have been recoded such that two cognate tRNAs and a cognate release factor are dispensable.

[0254] In a particular embodiment, the prokaryotic cell of the invention is an E. coli cell that does not express tRNA^{Ser}_{UGA}, tRNA^{Ser}_{CGA}, or RF-1, occurrences of the sense codon TCA have been recoded such that tRNA^{Ser}_{UGA} is dispensable (e.g. occurrences of TCA in essential genes of the parent strain have been replaced with AGT), occurrences of the sense codon TCG have been recoded such that tRNA^{Ser}_{CGA} is dispensable (e.g. occurrences of TCG in essential genes of the parent strain have been replaced with AGC), and occurrences of the stop codon TAG have been recoded such that RF-1 is dispensable (e.g. occurrences of TAG in essential genes of the parent strain have been replaced with TAA). The prokaryotic cell may also have been modified to include first, second, and third orthogonal aminoacyl-tRNA synthetase-tRNA pairs capable of decoding the TCA, TCG, and TAG codons and incorporating non-canonical amino acids into such sites during polymer formation.

[0255] In some embodiments the genome of the prokaryotic cell of the invention comprises a polynucleotide sequence which is at least 80%, 85%, 90%, 95%, 98%, 99%, 99.5%, 99.8%, 99.9%, or 100% identical to the sequence provided in GenBank accession number CP040347.1, and wherein the genome has been further altered such that tRNA^{Ser}_{UGA} and tRNA^{Ser}_{CGA} are not functionally expressed (for instance, by deleting serT and serU). The genome may have been even further altered such that RF-1 is not functionally expressed (for instance, by deleting prfA). An E. coli strain comprising a genome according to GenBank accession number CP040347.1 is referred to as Syn61 WT in the Examples disclosed herein.

[0256] In some embodiments the genome of the prokaryotic cell of the invention comprises a polynucleotide sequence which is at least 80%, 85%, 90%, 95%, 98%, 99%, 99.5%, 99.8%, 99.9%, or 100% identical to SEQ ID NO: 3, and wherein the genome has been further altered such that tRNA^{Ser}_{UGA} and tRNA^{Ser}_{CGA} are not functionally expressed (for instance, by deleting serT and serU). The genome may have been even further altered such that RF-1 is not functionally expressed (for instance, by deleting prfA). An E. coli strain comprising a genome according to SEQ ID NO: 3 is referred to as Syn61(ev1) in the Examples disclosed herein.

[0257] In some embodiments the genome of the prokaryotic cell of the invention comprises a polynucleotide sequence which is at least 80%, 85%, 90%, 95%, 98%, 99%, 99.5%, 99.8%, 99.9%, or 100% identical to SEQ ID NO: 4, and wherein the genome has been further altered such that tRNA^{Ser}_{UGA} and tRNA^{Ser}_{CGA} are not functionally expressed (for instance, by deleting serT and serU. The genome may have been even further altered such that RF-1 is not functionally expressed (for instance, by deleting prfA). An E. coli strain comprising a genome according to SEQ ID NO: 4 is referred to as Syn61(ev2) in the Examples disclosed herein.

[0258] In some embodiments the genome of the prokaryotic cell of the invention comprises a polynucleotide sequence which is at least 80%, 85%, 90%, 95%, 98%, 99%, 99.5%, 99.8%, 99.9%, or 100% identical to SEQ ID NO: 5. An E. coli strain comprising a genome according to SEQ ID NO: 5 is referred to as Syn61Δ3 in the Examples disclosed herein.

[0259] In some embodiments the genome of the prokaryotic cell of the invention comprises a polynucleotide sequence which is at least 80%, 85%, 90%, 95%, 98%, 99%, 99.5%, 99.8%, 99.9%, or 100% identical to SEQ ID NO: 6. An E. coli strain comprising a genome according to SEQ ID NO: 6 is referred to as Syn61Δ3(ev3) in the Examples disclosed herein.

[0260] In some embodiments the genome of the prokaryotic cell of the invention comprises a polynucleotide sequence which is at least 80%, 85%, 90%, 95%, 98%, 99%, 99.5%, 99.8%, 99.9%, or 100% identical to SEQ ID NO: 7. An E. coli strain comprising a genome according to SEQ ID NO: 7 is referred to as Syn61Δ3(ev4) in the Examples disclosed herein.

[0261] In some embodiments the genome of the prokaryotic cell of the invention comprises a polynucleotide sequence which is at least 80%, 85%, 90%, 95%, 98%, 99%, 99.5%, 99.8%, 99.9%, or 100% identical to SEQ ID NO: 8 (also provided as GenBank accession number CP071799.1). An E. coli strain comprising a genome according to SEQ ID NO: 8 is referred to as Syn61Δ3(ev5) in the Examples disclosed herein.

[0262] There is provided herein a prokaryotic cell comprising a genome which is at least 80%, 85%, 90%, 95%, 98%, 99%, 99.5%, 99.8%, 99.9%, or 100% identical to any one of: SEQ ID NO: 3, SEQ ID NO: 4, SEQ ID NO: 5, SEQ ID NO: 6, SEQ ID NO: 7, and SEQ ID NO: 8. The prokaryotic cell may be a bacterium, for instance E. coli. In some embodiments, the calculation of the sequence identity percentage excludes any sequence that has been inserted to enable the expression of an orthogonal aminoacyl-tRNA synthetase-tRNA pair or multiple orthogonal pairs. The calculation of sequence identity percentage may further exclude any exogenous sequences that have been further introduced into the genome. The genomes with less than 100% identity may comprise the recoded sense and stop codons as disclosed herein, hence in such embodiments the variation does not reintroduce the first type of sense codon, second type of sense codon, or first type of stop codon.

[0263] The inventors have identified that prokaryotic cells with recoded genomes or which lack a first and/or a second endogenous tRNA may have growth defects, unless specific steps are taking during the production of said prokaryotic cells. These steps are described herein.

[0264] The inventors further noted that some methods of inducing mutagenesis, for instance those involving the use of a mutagenesis plasmid, are not functional in the prokaryotic cells of the invention. The inventors have overcome this issue through the provision of specifically adapted reagents.

[0265] Thus, in a particular embodiment, the growth rate of the prokaryotic cell is faster than the growth rate of a reference prokaryotic cell of a parental strain.

[0266] The growth rates may be compared by preparing a cell culture of the prokaryotic cell of the invention, and a cell culture of the reference prokaryotic cell, and comparing the rate of change of the optical density of the culture medium. In some embodiments, the prokaryotic cell is a bacterial cell, such as E. coli, and the growth rates are compared by determined the doubling time at 37° C., 25° C. or 42° C. in LB media. The doubling time of the prokaryotic cell of the invention may be 1.1, 1.2, 1.3, 1.4, 1.5, 1.6, 1.7, 1.8, 1.9, 2, or 3 times faster than the doubling time of the reference prokaryotic cell.

[0267] A “parental strain” is a strain that existed or was created as part of the development of the prokaryotic cell of the invention. Hence, the prokaryotic cell of the invention is derived, directly or indirectly, from the parental strain. A parental strain may also be referred to as a “progenitor strain”.

[0268] The parental strain may be the prokaryotic cell strain obtained upon recoding the genome to remove particular types of sense and/stop codons, but before further steps are taken. The parental strain may comprise a genome wherein a first type of sense codon, a second type of sense codon, and a first type of stop codon have been recoded in the same manner as for a prokaryotic cell of the invention, and wherein the parental strain contains all endogenous tRNAs and release factors. For example, the parental strain may be the strain obtained upon recoding the genome to remove or reduce the number of TCG, TCA, and TAG codons. In a particular embodiment, the parental strain may be Syn61 or may comprise the genome of Syn61 (i.e. the sequence in GenBank accession number CP040347.1).

[0269] The parental strain may be the prokaryotic cell strain obtained upon removal of a first endogenous tRNA, a second endogenous tRNA, and/or a release factor, but before further steps are taken. For example, the parental strain may be the strain obtained upon removal of tRNA^{Ser}_{UGA}, tRNA^{Ser}_{CGA}, and RF-1. In a particular embodiment, the parental strain may be Syn61Δ3 or may comprise the genome of Syn61Δ3 (SEQ ID NO: 5).

[0270] The inventors provide experimental data herein demonstrating that the prokaryotic cell of the invention are resistant to phage. While it had been previously hypothesised that removing cellular tRNAs would provide phage resistance, the inventors have found that the removal of a first and a second endogenous tRNA provides complete resistance. This level of phage resistance is beyond that which would be predicted from the additive effect of removing these two tRNAs. Without being bound to a particular theory, the inventors note that endogenous tRNAs overlap in the codons that they are able to decode, and that some degree of read-through may be possible even where the tRNA is not normally known to be associated with the codon. As such, the removal of the first and the second endogenous tRNA synergises to provide a completely resistant prokaryotic cell.

[0271] Further to the preceding paragraph, the inventors provide data herein that demonstrate that the prokaryotic cells of the invention are more resistant to the accumulation of mutations that could lead to the rescue of viral propagation. For instance, the inventors noted that knocking out the gene ssrA in other strains, which have at least some phage resistance, can rescue viral propagation. In contrast, the knock out of ssrA from prokaryotic cells of the invention does not rescue viral propagation (FIG. 19). As such, the prokaryotic cells of the invention demonstrate surprisingly robust phage resistance, even if further mutations are accumulated.

[0272] Hence, in an embodiment, the prokaryotic cell of the invention is resistant to phage infection. The phage may be any phage containing the first type of sense codon, the second type of sense codon, and/or the first type of stop codon in its genome. For example, the prokaryotic cell of the invention may be resistant to T4 phage, T6 phage, T7 phage, λ phage, or P1vir phage. In some embodiments, prokaryotic cells of the invention are resistant to all five of these examples.

[0273] The prokaryotic cell of the invention may be resistant to horizontal gene transfer. For instance, horizontal transfer of the F plasmid.

[0274] The prokaryotic cell of the invention may be more resistant to infection or horizontal gene transfer than a reference prokaryotic cell which is of a parental strain. The parental strain may be any as described herein.

[0275] In some embodiments, prokaryotic cell of the invention are completely resistant to phage. The prokaryotic cell may be completely resistant to T4 phage, T6 phage, T7 phage, λ phage, and P1vir phage. The term “completely resistant”, as used herein, means that the growth rate of a culture of the prokaryotic cell of the invention is substantially or completely unaffected by the inclusion of a relevant phage in said culture. A control may be the inclusion of the same amount of killed phage. A relevant phage is a phage that would be capable of infecting a parental strain of the prokaryotic cell.

[0276] In particular embodiments, the prokaryotic cell of the invention is a bacterial cell. The bacterial cell may be of any species suitable for heterologous protein production, in particular the production of polypeptides comprising one or more non-canonical amino acids (for instance those described by Ferrer-Miralles, N. and Villaverde, A., 2013. Microbial Cell Factories, 12:113). Suitable bacterial host cells include: escherichia (e.g. Escherichia coli), caulobacteria (e.g. Caulobacter crescentus), phototrophic bacteria (e.g. Rodhobacter sphaeroides), cold adapted bacteria (e.g. Pseudoalteromonas haloplanktis, Shewanella sp. strain Ac10), pseudomonads (e.g. Pseudomonas fluorescens, Pseudomonas putida, Pseudomonas aeruginosa), halophilic bacteria (e.g. Halomonas elongate, Chromohalobacter salexigens), streptomycetes (e.g. Streptomyces lividans, Streptomyces griseus), nocardia (e.g. Nocardia lactamdurans), mycobacteria (e.g. Mycobacterium smegmatis), coryneform bacteria (e.g. Corynebacterium glutamicum, Corynebacterium ammoniagenes, Brevibacterium lactofermentum), bacilli (e.g. Bacillus subtilis, Bacillus brevis, Bacillus megaterium, Bacillus licheniformis, Bacillus amyloliquefaciens), vibrio bacteria (e.g. Vibrio cholera, Vibrio natriegens), and lactic acid bacteria (e.g. Lactococcus lactis, Lactobacillus plantarum, Lactobacillus casei, Lactobacillus reuteri, Lactobacillus gasseri). In some embodiments the bacterium is gram-negative bacterium.

[0277] In particular embodiments, the bacterium is an Escherichia coli, Salmonella enterica, or Shigella dysenteriae. More preferably, the cell is an E. coli. Suitable E. coli cells include K-12, MG1655, BL21, BL21(DE3), AD494, Origami, HMS174, BLR(DE3), HMS174(DE3), Tuner(DE3), Origami2(DE3), Rosetta2(DE3), Lemo21(DE3), NiCo21(DE3), T7 Express, SHuffle Express, C41(DE3), C43(DE3), and m15 pREP4 or derivatives thereof (Rosano, G. L. and Ceccarelli, E. A., 2014. Frontiers in microbiology, 5, p. 172). In particular, the cell may be MG1655 or BL21, or a derivative thereof. MG1655 is considered as the wild type strain of E coli. The GenBank ID of genomic sequence of this strain is U00096. BL21 is widely available commercially. For example, it can be purchased from New England BioLabs with catalog number C2530H.

[0278] The prokaryotic cell may contain a genome which is derived from the same species or strain, or may be derived from a different species. For example, if the prokaryotic cell is E. coli the genome may be an E. coli genome.

### Prokaryotic Cells Comprising Orthogonal Aminoacyl-tRNA Synthetase-tRNA Pairs

[0279] The inventors provide experimental data herein demonstrating that a first orthogonal aminoacyl-tRNA synthetase and a first orthogonal tRNA, which form an orthogonal pair, may be introduced into a prokaryotic cell of the invention to replace an endogenous tRNA. The first orthogonal tRNA may decode a type of sense codon which has been removed from the genome, for instance the first type of sense codon may have been removed from the genome in any manner disclosed herein. The first orthogonal aminoacyl-tRNA synthetase specifically aminoacylates the orthogonal cognate tRNA with an amino acid, which may be a non-canonical amino acid. Hence, the prokaryotic cell may contain a system wherein an endogenous tRNA has been replaced with a first orthogonal tRNA, such that a first type of sense codon is repurposed to code for a non-canonical amino acid.

[0280] In addition, the inventors provide experimental data herein demonstrating that a first orthogonal aminoacyl-tRNA synthetase-tRNA pair and a second orthogonal aminoacyl-tRNA synthetase-tRNA pair may be introduced into a prokaryotic cell of the invention. The first tRNA may decode one of the sense codons removed from the genome, and the second tRNA may decode the other sense codon. The orthogonal aminoacyl-tRNA synthetases specifically aminoacylate their orthogonal cognate tRNA with an amino acid, which may be a non-canonical amino acid. Hence, the prokaryotic cell may contain a system wherein two or more sense codons have been repurposed to code for non-canonical amino acids.

[0281] In cells wherein a stop codon has been recoded, a third orthogonal aminoacyl-tRNA synthetase-tRNA pair may be introduced into the prokaryotic cell, allowing the recoded stop codon to be used to code for a third non-canonical amino acid. Hence, the prokaryotic cell may contain a system wherein two or more sense codons and one or more stop codons have been repurposed to code for a first, second, and third non-canonical amino acid. In a particular embodiment, the prokaryotic cell contains a system wherein TCA, TCG, and TAG encode a first, second, and third non-canonical amino acid. The first, second, and third non-canonical amino may be different from each other.

[0282] Thus, the orthogonal aminoacyl-tRNA synthetase (aaRS)-tRNA pairs may be capable of directing the incorporation of non-canonical amino acids into polymers using the protein synthesis apparatus of the prokaryotic cell. The orthogonal synthetases do not recognize endogenous tRNAs, and specifically aminoacylate an orthogonal cognate tRNA (which is not an efficient substrate for endogenous synthetases) with the non-canonical amino acids provided to (or synthesised by) the cell (Chin, J. W., 2017. Nature, 550(7674), 53-60).

[0283] In an embodiment, there is provided a prokaryotic cell wherein: the prokaryotic cell does not express a first endogenous tRNA, the prokaryotic cell comprises a genome wherein a first type of sense codon has been recoded such that the first endogenous tRNA is dispensable, the prokaryotic cell expresses a first orthogonal aminoacyl-tRNA synthetase and a first orthogonal tRNA, the first orthogonal aminoacyl-tRNA synthetase and the first orthogonal tRNA form a first orthogonal aminoacyl-tRNA synthetase-tRNA pair, and the first orthogonal tRNA is capable of decoding the first type of sense codon.

[0284] In another embodiment, there is provided a prokaryotic cell wherein: the prokaryotic cell does not express a first endogenous tRNA and a second endogenous tRNA, the prokaryotic cell comprises a genome wherein a first type of sense codon and a second type of sense codon have been recoded such that the first endogenous tRNA and the second endogenous tRNA are dispensable,
[0285] the prokaryotic cell expresses a first orthogonal aminoacyl-tRNA synthetase and a first orthogonal tRNA, the first orthogonal aminoacyl-tRNA synthetase and the first orthogonal tRNA form a first orthogonal aminoacyl-tRNA synthetase-tRNA pair, the first orthogonal tRNA is capable of decoding the first type of sense codon, and
[0286] the prokaryotic cell expresses a second orthogonal aminoacyl-tRNA synthetase and a second orthogonal tRNA, the second orthogonal aminoacyl-tRNA synthetase and the second orthogonal tRNA form a second orthogonal aminoacyl-tRNA synthetase-tRNA pair, the second orthogonal tRNA is capable of decoding the second type of sense codon.

[0287] In yet another embodiment, there is provided a prokaryotic cell, wherein:
[0288] the prokaryotic cell does not express a first endogenous tRNA, a second endogenous tRNA, and a first endogenous release factor,
[0289] the prokaryotic cell comprises a genome wherein a first type of sense codon and a second type of sense codon have been recoded such that the first endogenous tRNA and the second endogenous tRNA are dispensable, and a first type of stop codon has been recoded such that the first endogenous release factor is dispensable,
[0290] the prokaryotic cell expresses a first orthogonal aminoacyl-tRNA synthetase and a first orthogonal tRNA, the first orthogonal aminoacyl-tRNA synthetase and the first orthogonal tRNA form a first orthogonal aminoacyl-tRNA synthetase-tRNA pair, the first orthogonal tRNA is capable of decoding the first type of sense codon;
[0291] the prokaryotic cell expresses a second orthogonal aminoacyl-tRNA synthetase and a second orthogonal tRNA, the second orthogonal aminoacyl-tRNA synthetase and the second orthogonal tRNA form a second orthogonal aminoacyl-tRNA synthetase-tRNA pair, the second orthogonal tRNA is capable of decoding the second type of sense codon; and
[0292] the prokaryotic cell expresses a third orthogonal aminoacyl-tRNA synthetase and a third orthogonal tRNA,
[0293] the third orthogonal aminoacyl-tRNA synthetase and the third orthogonal tRNA form a third orthogonal aminoacyl-tRNA synthetase-tRNA pair, and
[0294] the third orthogonal tRNA is capable of decoding the first type of stop codon.

[0295] The aminoacyl-tRNA synthetases used herein may be varied. Although specific tRNA synthetase sequences may have been used in the examples, the invention is not intended to be confined only to those examples. In principle any aminoacyl-tRNA synthetase which provides a tRNA charging (aminoacylation) function can be employed. For example the tRNA synthetase may be from any suitable species such as from archaea, for example from Methanosarcina—such as Alethanosarcina barkeri MS; Methanosarcina barkeri str. Fusaro; Methanosarcina mazei G01; Methanosarcina acetivorans C2A; Methanosarcina thermophila; or Methanococcoides—such as Methanococcoides burtonii. Alternatively the tRNA synthetase may be from bacteria, for example from Desulfitobacterium—such as Desulfitobacterium hafniense DCB-2; Desulfitobacterium hafniense Y51; Desulfitobacterium hafniense PCP1; or Desulfotomaculum acetoxidans DSM 771.

[0296] The aminoacyl-tRNA synthetase may be a pyrrolysyl tRNA synthetase (PylRS). The PylRS may be a wild-type or a genetically engineered PylRS. Genetically engineered PylRS has been described, for example, by Neumann et al. (Nat Chem Biol 4:232, 2008) and by Yanagisawa et al. (Chem Biol 2008, 15:1187), in EP2192185A1, and in WO2016/066995 (each incorporated herein by reference). Suitably, a genetically engineered tRNA synthetase gene is selected that increases the incorporation efficiency of non-canonical amino acid(s). The PylRS may be Methanosarcina barkeri (MbPylRS) or Methanosarcina mazei (MmPylRS).

[0297] The tRNA used herein may be varied. Although specific tRNAs may have been used in the examples, the invention is not intended to be confined only to those examples. In principle, any tRNA can be used provided that it is compatible with the selected tRNA synthetase.

[0298] The tRNA may be from any suitable species such as from archea, for example from Methanosarcina—such as Methanosarcina barkeri MS; Methanosarcina barkeri str. Fusaro; Methanosarcina mazei. G01; Methanosarcina acetivorans C2A; Methanosarcina thermophila; or Methanococcoides—such as Methanococcoides burtonii. Alternatively the tRNA may be from bacteria, for example from Desulfitobacterium—such as Desulfitobacterium hafniense DCB-2; Desulfitobacterium hafniense Y51; Desulfitobacterium hafniense PCP1; or Desulfotomaculum acetoxidans DSM 771.

[0299] The tRNA gene can be a wild type tRNA gene or it may be a mutated tRNA gene. Suitably, a mutated tRNA gene is selected that increases the incorporation efficiency of unnatural amino acid(s). In one embodiment, the mutated tRNA gene is a U25C variant of PylT as described in Biochemistry (2013) 52, 10 (incorporated herein by reference).

[0300] In one embodiment, the mutated tRNA gene is an Opt variant of PylT as described in Fan et al. (Nucleic Acids Research doi:10.1093/nar/gkv800) (incorporated herein by reference herein).

[0301] In one embodiment, the mutated tRNA gene has both the U25C and the Opt variants of PylT, i.e. in this embodiment the tRNA, such as the PylT tRNA_{CUA} gene, comprises both the U25C and the Opt mutations.

[0302] In one embodiment, the sequence encoding the tRNA is the pyrrolysine tRNA (PylT) gene from Methanosarcina mazei pyrrolysine which encodes tRNAPyl.

[0303] The aminoacyl-tRNA synthetase and tRNA pair may be as disclosed in, or adapted from those disclosed in, Cervettini et al. (Rapid discovery and evolution of orthogonal aminoacyl-tRNA synthetase-tRNA pairs, Nature Biotechnology, Vol 38, 990 August 2020, P 989-999) or Dunkelmann et al. (Engineered triply orthogonal pyrrolysyl-tRNA synthetase/tRNA pairs enable the genetic encoding of three distinct non-canonical amino acids, Nature Chemistry, Vol 12, June 2020 P 535-544). Each of these documents is incorporated by reference.

[0304] As mentioned in the background section, the aaRS, tRNA, and codon preferably function together and are orthogonal to each endogenous amino acid, aaRS and group of isoacceptor tRNAs and their cognate group of codons. In addition, there is the potential for interactions between components of the first, second, and third ncAA:aaRS:tRNA:codon sets, and these are preferably also minimised.

[0305] As such, the identification of multiple engineered mutually orthogonal aaRS/tRNA pairs that recognise distinct codons and incorporate distinct non-canonical amino acids, and can be used in combination, provides a valuable contribution to the art. The inventors provide herein novel aaRS and tRNA pairs, and also provide new combinations of said pairs that are demonstrated herein to function in combination.

[0306] Thus, in an aspect of the invention there is provided the aaRS Methanomethylophilus sp. 1R26 PylRS (1R26PylRS). 1R26PylRS may have the following sequence:

(SEQ ID NO: 9)
MAEHFTDAQIQRLREYGNGTYKDMEFADVSAREKAFTKLMSDASRDNES
ALKGMIAHPARQGLSRLMNDIADALVADGFIEVRTPIIISKDALAKMTI
TPDKPLFKQVFWIDDKRALRPMLAPSLYTVMRSLRDHTDGPVKIFEMGS
CFRKESHSGMHLEEFTMLNLVDMGPAGDATESLKKYIGIVMKAAGLPDY
QLVHEESDVYKETIDVEINGQEVCSAAVGPHYLDAAHDVHEPWAGAGFG
LERLLTIRQGYSTVMKGGASTTYLNGAKMD.

[0307] In an embodiment, the synthetase is a variant of 1R26PylRS further comprising mutations necessary to allow the recognition of, or to alter the specificity for, a non-canonical amino acid. In particular embodiments, the aaRS may be according to SEQ ID NO: 9, comprising any one or a combination of substitutions at the following residues: L121, L125, Y126, M129, N166, V168, Y206, A223. Mutation at the aforementioned residues may be used to generate variants of 1R26PylRS with altered selectivity to non-canonical amino acids.

[0308] The synthetase may be 1R26PylRS(CbzK). 1R26PylRS(CbzK) may be a mutant of 1R26PylRS comprising the following mutations: i) Y126G and M129L, or ii) M129A and Y206F. 1R26PylRS(CbzK) is suitable for directing the incorporation of NE-(carbobenzyloxy)-1-lysine (CbzK). 1R26PylRS(CbzK) may according to SEQ ID NO: 10 or 11.

[0309] The synthetase may be 1R26PylRS(AllocK). 1R26PylRS(AllocK) may be a mutant of 1R26PylRS comprising the mutations N166Q and Y206F, and is suitable for directing the incorporation of 6-N-Alloc-L-lysine (AllocK). 1R26PylRS(AllocK) may according to SEQ ID NO: 12.

[0310] The synthetase may be 1R26PylRS(Bta). 1R26PylRS(Bta) may be a mutant of 1R26PylRS comprising the mutations N166S, V168M, Y206F, and A223G, and is suitable for directing the incorporation of 3-Benzothienyl-L-alanine (Bta). 1R26PylRS(Bta) may according to SEQ ID NO: 13.

[0311] The synthetase may be 1R26PylRS(NMH). 1R26PylRS(NMH) may be a mutant of 1R26PylRS comprising the mutations L121M, L125I, Y126F, M129A, V168F, and is suitable for directing the incorporation of 3-N-Methyl-L-histidine (NMH). 1R26PylRS(NMH) may according to SEQ ID NO: 14.

[0312] In an embodiment, the aaRS is at least 50%, 60%, 70%, 80%, 90%, 95%, 99%, or 100% similar or identical to any one of SEQ ID NOs: 9-14. The aaRS may be at least 50%, 60%, 70%, 80%, 90%, 95%, 99%, or 100% identical to SEQ ID NO: 9, comprising any one of the following groups of mutations: i) L121L, L125L, Y126G, M129L, N166N, V168V, Y206Y, A223A; ii) L121L, L125L, Y126Y, M129A, N166N, V168V, Y206F, A223A; iii) L121L, L125L, Y126Y, M129M, N166Q, V168V, Y206F, A223A; iv) L121L, L125L, Y126Y, M129M, N166S, V168M, Y206F, A223G; and v) L121M, L125I, Y126F, M129A, N166N, V168F, Y206Y, A223A.

[0313] FIG. 20 provides a sequence alignment where “*” indicates residues found in all aligned aaRS sequences, “:” indicates residues within strong similarity between the aligned sequences, and “.” indicates residues within some similarity between the aligned sequences. The aaRS may be at least 50%, 60%, 70%, 80%, 90%, 95%, 99%, or 100% identical to any one of SEQ ID NOs: 9-14, wherein the variation is found only in residues not marked with: i) “*”; ii) “*” or “:”, or iii) “*” or “:”, or “.”.

[0314] 1R26PylRS, and its variants and derivatives, may paired with the tRNA Methanomethylophilus alvus (Alv) tRNA^{ΔNPyl(8)}.

[0315] Thus, in another aspect of the invention, there is provided AlvtRNA^{NPyl(8)}. AlvtRNA^{ΔNPyl(8)} may have the following sequence:

(SEQ ID NO: 61)
GGGGGACGGTCCGGCGACCAGCGGGTCTNNNAAACCTAGCcttgCGGGGT
TCGACaCCCCGGTCTCTCGCCA,

wherein the anticodon is the “NNN” triplet.

[0316] In a particular embodiment, AlvtRNA^{ΔNPyl(8)} may have the following sequence:

(SEQ ID NO: 15)
GGGGGACGGTCCGGCGACCAGCGGGTCTCTAAAACCTAGCcttgCGGGGT
TCGACaCCCCGGTCTCTCGCCA.

[0317] AlvtRNA^{ΔNPyl(8)} may be modified to include any anticodon. AlvtRNA^{ΔNPyl(8)}_{CGA} is exemplified herein, but the invention need not be limited in this manner. The tRNA may be at least 80%, 90%, 95%, 99%, or 100% identical to SEQ ID NO: 15 or 61.

[0318] In an aspect of the invention, there is provided a host cell comprising any 1R26PylRS, or variant or derivative thereof, disclosed herein and any AlvtRNA^{ΔNPyl(8)}, or variant or derivative thereof, disclosed herein, wherein the 1R26PylRS and AlvtRNA^{ΔNPyl(8)} form an orthogonal aminoacyl-tRNA synthetase-tRNA pair. The host cell may be any suitable for heterologous protein production, in particular the production of polypeptides comprising one or more non-canonical amino acids. The host cell may be a prokaryotic or a eukaryotic cell. The host cell may be a bacterial cell, such as E. coli. The host cell may be a eukaryotic cell, such as a mammalian or insect cell line. The host cell may be a human cell. The host cell may be any bacterium of the invention as disclosed herein.

[0319] 1R26PylRS and AlvtRNA^{ΔNPyl(8)} are also provided herein in the isolated forms. A molecule is considered to be “isolated”, as used herein, when it is not found in its natural environment (i.e. when it is not expressed as a wild type protein in the cells in which it occurs naturally). A molecule may be isolated and found as part of another composition (e.g. if expressed by a host cell which would not naturally express the molecule).

[0320] Another aaRS disclosed herein is the Archaeoglobus fulgidus tyrosyl-tRNA synthetase (AfTyrRS). AfTyrRS is suitable for use in the prokaryotic cell of the present invention. AfTyrRS may have the following sequence:

(SEQ ID NO: 16)
MDITEKLRLITRNAEEVVTEEELRQLIETKEKPRAYVGYEPSGEIHLGHM
MTVQKLMDLQEAGFEIIVLLADIHAYLNEKGTFEEIAEVADYNKKVFIAL
GLDESRAKFVLGSEYQLSRDYVLDVLKMARITTLNRARRSMDEVSRRKED
PMVSQMIYPLMQALDIAHLGVDLAVGGIDQRKIHMLARENLPRLGYSSPV
CLHTPILVGLDGQKMSSSKGNYISVRDPPEEVERKIRKAYCPAGVVEENP
ILDIAKYHILPRFGKIVVERDAKFGGDVEYASFEELAEDFKSGQLHPLDL
KIAVAKYLNMLLEDARKRLGVSV

[0321] In an embodiment, the synthetase is a variant of AfTyrRS further comprising mutations necessary to allow the recognition of, or to alter the specificity for, a non-canonical amino acid. In particular embodiments, the aaRS may be according to SEQ ID NO: 16, comprising any one or a combination of substitutions at the following residues: Y36, L69, H74, Q116, D165, I166, or N190. Mutation at the aforementioned residues may be used to generate variants of AfTyrRS with altered selectivity to non-canonical amino acids.

[0322] In another embodiment, the synthetase may be AfTyrRS(p-I-Phe). AfTyrRS(p-I-Phe) may be a mutant of AfTyrRS comprising the following mutations: Y36I, L69M, H74L, Q116E, D165T, and I166G, and is suitable for directing the incorporation of p-I-Phe. AfTyrRS(p-I-Phe) may be according to SEQ ID NO: 17.

[0323] In another embodiment, the synthetase may be AfTyrRS(p-Az-Phe). AfTyrRS(p-Az-Phe) may be a mutant of AfTyrRS comprising the following mutations: Y36T, H74L, Q116E, D165T, I166G, and N190K, and is suitable for directing the incorporation of p-Az-Phe. AfTyrRS(p-Az-Phe) may be according to SEQ ID NO: 18.

[0324] In another embodiment, the synthetase may be AfTyrRS(o-Methyl-Tyrosine). AfTyrRS(o-Methyl-Tyrosine) may be a mutant of AfTyrRS comprising the following mutations: Y36I, H74L, Q116E, D165T, I166G, and is suitable for directing the incorporation of o-Methyl-Tyrosine. AfTyrRS(o-Methyl-Tyrosine) may be according to SEQ ID NO: 19.

[0325] In an embodiment, the aaRS may be at least 50%, 60%, 70%, 80%, 90%, 95%, 99%, or 100% similar or identical to any one of SEQ ID NOs: 16 to 19. The aaRS may be at least 50%, 60%, 70%, 80%, 90%, 95%, 99%, or 100% identical to SEQ ID NO: 16, comprising any one of the following groups: i) Y36I, L69M, H74L, Q116E, D165T, I166G, N190N; ii) Y36T, L69L, H74L, Q116E, D165T, I166G, N190K; and iii) Y36I, L69L, H74L, Q116E, D165T, I166G, N190N.

[0326] AfTyrRS, and its variants and derivatives, may be paired with the tRNA Af-tRNA^{Tyr(A01)}_{YYY}. Af-tRNA^{Tyr(A01)}_{YYY} may have the following sequence:

(SEQ ID NO: 62)
CCCGCCCTAGCTCAGAGGTAGAGCGTGCTTCTNNNAAAAGCATGGTCCCC
GGTTCAAATCCTGGGGGCGGGACCA,

wherein the anticodon is the “NNN” triplet.

[0327] In a particular embodiment, Af-tRNA^{Tyr(A01)} may have the following sequence:

(SEQ ID NO: 20)
CCCGCCCTAGCTCAGAGGTAGAGCGTGCTTCTctaAAAAGCATGGTCCCC
GGTTCAAATCCTGGGGGCGGGACCA

[0328] Af-tRNA^{Tyr(A01)}_{YYY} may be modified to include any anticodon. Af-tRNA^{Tyr(A01)}_{CUA} is exemplified herein, but the invention need not be limited in this manner. The tRNA may be at least 80%, 90%, 95%, 99%, or 100% identical to SEQ ID NO: 20 or 62.

[0329] Another aaRS disclosed herein is MmPylRS. MmPylRS is an aaRS suitable for use in the prokaryotic cell of the present invention. MmPylRS may have the following sequence:

(SEQ ID NO: 21)
MDKKPLNTLISATGLWMSRTGTIHKIKHHEVSRSKIYIEMACGDHLVVNN
SRSSRTARALRHHKYRKTCKRCRVSDEDLNKFLTKANEDQTSVKVKVVSA
PTRTKKAMPKSVARAPKPLENTEAAQAQPSGSKFSPAIPVSTQESVSVPA
SVSTSISSISTGATASALVKGNTNPITSMSAPVQASAPALTKSQTDRLEV
LLNPKDEISLNSGKPFRELESELLSRRKKDLQQIYAEERENYLGKLEREI
TRFFVDRGFLEIKSPILIPLEYIERMGIDNDTELSKQIFRVDKNFCLRPM
LAPNLYNYLRKLDRALPDPIKIFEIGPCYRKESDGKEHLEEFTMLNFCQM
GSGCTRENLESIITDFLNHLGIDFKIVGDSCMVYGDTLDVMHGDLELSSA
VVGPIPLDREWGIDKPWIGAGFGLERLLKVKHDFKNIKRAARSESYYNGI
STNL.

[0330] In an embodiment, the synthetase is a variant of MmPylRS further comprising mutations necessary to allow the recognition of, or alter the specificity for, a non-canonical amino acid. In particular embodiments, the aaRS may be according to SEQ ID NO: 21, comprising any one or a combination of substitutions at the following residues: L301, A302, L305, Y306, L309, N346, C348, Y384, V401, or W417. Mutation at the aforementioned residues may be used to generate variants of MmPylRS with altered selectivity to non-canonical amino acids.

[0331] The synthetase may be MmPylRS(Bpa). MmPylRS(Bpa) may be a mutant of MmPylRS comprising the mutations A302T, N346T, C348T, and W417C, and is suitable for directing the incorporation of p-Benzoyl-L-phenylalanine (Bpa). MmPylRS(Bpa) may be according to SEQ ID NO: 22.

[0332] The synthetase may be MmPylRS(Bta). MmPylRS(Bta) may be a mutant of MmPylRS comprising the mutations N346S, C348M, Y384F, and V401G, and is suitable for directing the incorporation of 3-Benzothienyl-L-alanine (Bta). MmPylRS(Bta) may be according to SEQ ID NO: 23.

[0333] The synthetase may be MmPylRS(CbzK). MmPylRS(CbzK) may be a mutant of MmPylRS comprising the mutations: i) Y306G, or ii) L309A, C348V, Y384F, and is suitable for directing the incorporation of N6-Cbz-L-Lysine (CbzK). MmPylRS(CbzK) may be according to SEQ ID NO: 24 or SEQ ID NO: 25.

[0334] The synthetase may be MmPylRS(NMH). MmPylRS(NMH) may be a mutant of MmPylRS comprising the mutations L301M, L305I, Y306F, L309A, and C348F, and is suitable for directing the incorporation of 3-N-Methyl-L-histidine (NMH). MmPylRS(NMH) may be according to SEQ ID NO: 26.

[0335] In other embodiments, the MmPylRS may be adapted to be suitable for directing the incorporation of BocK, AllocK, p-I-Phe, CypK, or AlkK.

[0336] In an embodiment, the aaRS may be at least 50%, 60%, 70%, 80%, 90%, 95%, 99%, or 100% similar or identical to any one of SEQ ID NOs: 21 to 26. The aaRS may be at least 50%, 60%, 70%, 80%, 90%, 95%, 99%, or 100% identical to SEQ ID NO: 21, comprising any one of the following groups: i) L301L, A302T, L305L, Y306Y, L309L, N346T, C348T, Y384Y, V401V, W417C; ii) L301L, A302A, L305L, Y306Y, L309L, N346S, C348M, Y384F, V401G, W417W; iii) L301L, A302A, L305L, Y306G, L309L, N346N, C348C, Y384Y, V401V, W417W, iv) L301L, A302A, L305L, Y306Y, L309A, N346N, C348V, Y384F, V401V, W417W; and v) L301M, A302A, L305I, Y306F, L309A, N346N, C348F, Y384Y, V401V, W417W.

[0337] FIG. 20 provides a sequence alignment. The aaRS may be at least 50%, 60%, 70%, 80%, 90%, 95%, 99%, or 100% identical to any one of SEQ ID NOs: 21-26, wherein the variation is found only in residues not marked with: i) “*”; ii) “*” or “:”, or iii) or “*”, “:”, or “.”.

[0338] MmPylRS, and derivatives, may paired with the tRNA MmtRNA^{Pyl}_{YYY}. MmtRNA^{Pyl}_{YYY} may have the following sequence:

(SEQ ID NO: 63)
GGaAACCTGATCATGTAGATCGAATGGACTNNNAATCCGTTCAGCCGGGT
TAGATTCCCGGGGTTTCCGCCA,

wherein the anticodon is the “NNN” triplet.

[0339] In an embodiment, the MmtRNA^{Pyl} may have the following sequence:

(SEQ ID NO: 27)
GGaAACCTGATCATGTAGATCGAATGGACTCTAAATCCGTTCAGCCGGGT
TAGATTCCCGGGGTTTCCGCCA.

[0340] MmtRNA^{Pyl}_{YYY} may be modified to include any anticodon. MmtRNA^{Pyl}_{UGA} is exemplified herein, but the invention need not be limited in this manner. The tRNA may be at least 80%, 90%, 95%, 99%, or 100% identical to SEQ ID NO: 27 or 63.

[0341] Another aaRS disclosed herein is M jannaschii tyrosyl-tRNA synthetase (MjTyrRS). MjTyrRS is an aaRS suitable for use in the prokaryotic cell of the present invention. The MjTyrRS may be as disclosed in J. N. Beyer et al. (Journal of Molecular Biology 432, 4690-4704 (2020); incorporated herein by reference).

[0342] MjTyrRS may have the following sequence:

(SEQ ID NO: 28)
MDEFEMIKRNTSEIISEEELREVLKKDEKSAYIGFEPSGKIHLGHYLQIK
KMIDLQNAGFDIIILLADLHAYLNQKGELDEIRKIGDYNKKVFEAMGLKA
KYVYGSEFQLDKDYTLNVYRLALKTTLKRARRSMELIAREDENPKVAEVI
YPIMQVNDIHYLGVDVAVGGMEQRKIHMLARELLPKKVVCIHNPVLTGLD
GEGKMSSSKGNFIAVDDSPEEIRAKIKKAYCPAGVVEGNPIMEIAKYFLE
YPLTIKRPEKFGGDLTVNSYEELESLFKNKELHPMDLKNAVAEELIKILE
PIRKRL.

[0343] In an embodiment, the synthetase is a variant of MjTyrRS further comprising mutations necessary to allow the recognition of, or to alter the specificity for, a non-canonical amino acid. In particular embodiments, the aaRS may be according to SEQ ID NO: 28, comprising any one or a combination of substitutions at the following residues: Y32, L65, H70, F108, Q109, D158, I159, or L162. Mutation at the aforementioned residues may be used to generate variants of MjTyrRS with altered selectivity to non-canonical amino acids.

[0344] In another embodiment, the synthetase may be MjTyrRS(3-Nitro-Tyr). MjTyrRS(3-Nitro-Tyr) is a mutant of MjTyrRS comprising the mutations Y32H, H70T, D158H, I159A, and L162R. MjTyrRS(3-Nitro-Tyr) is suitable for directing the incorporation 3-Nitro-Tyr. MjTyrRS(3-Nitro-Tyr) may be according to SEQ ID NO: 29.

[0345] In another embodiment, the synthetase may be MjTyrRS(p-Az-Phe). MjTyrRS(p-Az-Phe) is a mutant of MjTyrRS comprising the mutations Y32L, L65V, F108W, Q109M, D158G, and I159A. MjTyrRS(p-Az-Phe) is suitable for directing the incorporation p-Az-Phe. MjTyrRS(p-Az-Phe) may be according to SEQ ID NO: 30.

[0346] In an embodiment, the aaRS may be at least 50%, 60%, 70%, 80%, 90%, 95%, 99%, or 100% similar or identical to any one of SEQ ID NOs: 28 to 30. The aaRS may be at least 50%, 60%, 70%, 80%, 90%, 95%. 99%. or 100% identical to SEQ ID NO: 28, comprising any one of the following groups: i) Y32H, L65L, H70T, F108F, Q109Q, D158H, I159A, L162R; and ii) Y32L, L65V, H70H, F108W, Q109M, D158G, I159A, L162L.

[0347] MjTyrRS, and derivatives, may paired with the tRNA MjtRNA^{Tyr}_{YYY}. The MjRNA^{Tyr}_{YYY} may be as disclosed in N. Beyer et al. (Journal of Molecular Biology 432, 4690-4704 (2020). MjtRNA^{Tyr}_{YYY} may have the following sequence:

(SEQ ID NO: 64)
CCGGCGGTAGTTCAGCAGGGCAGAACGGCGGACTNNNAATCCGCATGGCA
GGGGTTCAAATCCCCTCCGCCGGACCA,

wherein the anticodon is the “NNN” triplet.

[0348] In an embodiment, the MjtRNA^{Tyr} may have the following sequence:

(SEQ ID NO: 31)
CCGGCGGTAGTTCAGCAGGGCAGAACGGCGGACTCTAAATCCGCATGGCA
GGGGTTCAAATCCCCTCCGCCGGACCA.

[0349] MjtRNA^{Tyr}_{YYY} may be modified to include any anticodon. MjtRNA^{Tyr}_{CGA} is exemplified herein, but the invention need not be limited in this manner. The tRNA may be at least 80%, 90%, 95%, 99%, or 100% identical to SEQ ID NO: 31 or 64.

[0350] Another aaRS disclosed herein is Methanomassiliicoccus luminyensis 1 (Lum1) PylRS. Lum1PylRS is an aaRS suitable for use in the prokaryotic cell of the present invention. The Lum1PylRS may have the following sequence:

(SEQ ID NO: 32)
MDTRLTPAQAQRIREMGGTVDPSLAFSSEAERESAFQRISADLQGANLAK
IRRCAEAPERHPIGSLENTLACALAAKGFIEVKTPMMIPADGLVKMGIDE
SHPLWNQVFWVGPKKALRPMLAPNLYFLMRHLRRSVPAPLLLFEIGPCFR
KESRGSNHLEEFTMLNLVELAPQADATERLKEHIATVMNAVGLPYELVVE
GSEVYGTTIDVEVDGVELASGAVGPLPMDKPHGITEPWAGVGFGLERIAL
MRTKEQNIKKVGRSLVYVNGARIDI.

[0351] In an embodiment, the synthetase is a variant of Lum1PylRS further comprising mutations necessary to allow the recognition of, or to alter the specificity for, a non-canonical amino acid. In particular embodiments, the aaRS may be according to SEQ ID NO: 32, comprising any one or a combination of substitutions at the following residues: L121, L125, Y126, M129, and V168. Mutation at the aforementioned residues may be used to generate variants of Lum1PylRS with altered selectivity to non-canonical amino acids.

[0352] The synthetase may be Lum1PylRS(CbzK). Lum1PylRS(CbzK) may be a mutant of Lum1PylRS comprising the mutations Y126G and M129L, and is suitable for directing the incorporation of CbzK. Lum1PylRS(CbzK) may be according to SEQ ID NO: 33.

[0353] The synthetase may be Lum1PylRS(NMH). Lum1PylRS(NMH) may be a mutant of Lum1PylRS comprising the mutations L121M, L125I, Y126F, M129A, and V168F, and is suitable for directing the incorporation of 3-N-Methyl-L-histidine (NMH). Lum1PylRS(NMH) may be according to SEQ ID NO: 34.

[0354] In an embodiment, the aaRS may be at least 50%, 60%, 70%, 80%, 90%, 95%, 99%, or 100% similar or identical to any one of SEQ ID NOs: 32 to 34. The aaRS may be 50%, 60%, 70%, 80%, 90%, 95%, 99%, or 100% identical to SEQ ID NO: 32, comprising any one of the following groups: i) L121L, L125L, Y126G, M129L, V168V; and ii) L121M, L125I, Y126F, M129A, V168F.

[0355] FIG. 20 provides a sequence alignment. The aaRS may be at least 50%, 60%, 70%, 80%, 90%, 95%, 99%, or 100% identical to any one of SEQ ID NOs: 32-34, wherein the variation is found only in residues not marked with: i) “*”; ii) “*” or “:”, or iii) or “*”, “:”, or “.”.

[0356] Lum1PylRS, and derivatives, may paired with the M. intenstinalis tRNAs. Such tRNAs may have the following sequence:

(SEQ ID NO: 65)
GGCGAACTGGTCCGGGACCACCAGGCCTNNNAAGCCACGGTTAGCCGGGT
TCAACTCCCGGGTTCGTCGCCA,

wherein the anticodon is the “NNN” triplet.

[0357] In an embodiment, the M. intenstinalis tRNA may have the following sequence:

(SEQ ID NO: 66)
GGCGAACTGGTCCGGGACCACCAGGCCTctaAAGCCACGGTTAGCCGGGT
TCAACTCCCGGGTTCGTCGCCA

[0358] The M. intenstinalis tRNA may be modified to include any anticodon. The tRNA may be at least 80%, 90%, 95%, 99%, or 100% identical to SEQ ID NO: 65 or 66.

[0359] Another aaRS disclosed herein is NitroPylRS, which is an aaRS from Nitrososphaeria archaeon (NCBI protein accession is HHP52415.1). NitroPylRS is an aaRS suitable for use in the prokaryotic cell of the present invention. The NitroPylRS may have the following sequence:

(SEQ ID NO: 35)
MSKIRFTRGQIHRLIELGAEPTELERDFETEAERDKEFNKIAENLARKNL
KNIKDFLEQRRKPLVRVIEEKLRTTALRLGFSEVVTPIIIPRLFIKRMGI
DEGDPLWKQVMLIDDKRALRPMLAPNLYVLMAKLSNIVRPVKIFEIGPCF
RRETGGRYHLEEFTMFNMVELAPEGDPKERLLDYIDTIMRDIGLNYTISV
EPSNVYGETLDVVVNGIEVASAAIGPKPIDANWGVREPWIGVGFGVERLA
MLVGGYNSIARIAKSLSYLDGSTLSVIKLRW.

[0360] In an embodiment, the synthetase is a variant of NitroPylRS further comprising mutations necessary to allow the recognition of, or to alter the specificity for, a non-canonical amino acid.

[0361] The synthetase may be NitroPylRS (NMH). NitroPylRS(NMH) may be a mutant of NitroPylRS comprising the mutations L123M, L127I, Y128F, M131A, and V169F, and is suitable for directing the incorporation of NMH. NitroPylRS(NMH) may be according to SEQ ID NO: 36.

[0362] In an embodiment, the aaRS may be at least 50%, 60%, 70%, 80%, 90%, 95%, 99%, or 100% similar or identical to SEQ ID NO: 35 or SEQ ID NO: 36. The aaRS may be at least 50%, 60%, 70%, 80%, 90%, 95%, 99%, or 100% identical to SEQ ID NO: 36, comprising the following substitutions L123M, L127I, Y128F, M131A, and V169F.

[0363] FIG. 20 provides a sequence alignment. The aaRS may be at least 50%, 60%, 70%, 80%, 90%, 95%, 99%, or 100% identical to SEQ ID NO: 35 or SEQ ID NO: 36, wherein the variation is found only in residues not marked with: i) “*”; ii) “*” or “:”, or iii) or “*”, “:”, or “.”.

[0364] NitroPylRS, and derivatives, may paired with the a tRNA derived from Methanohalarchaeum thermophilum. Such tRNAs may have the following sequence:

(SEQ ID NO: 53)
GGGGGGCTGGTCGGGTGGCCAAGGGGGCTCTAAACCCTCGGTTGCCGGGT
TCAACTCCCGGGCTCCCCACCA.

[0365] SEQ ID NO: 53 may be modified to include any anticodon. The tRNA may be at least 80%, 90%, 95%, 99%, or 100% identical to SEQ ID NO: 53.

[0366] Another aaRS disclosed herein is ClosΔNTDPylRS, which is an aaRS from Clostridiales bacterium (accession no. NLY82529.1). ClosΔNTDPylRS is an aaRS suitable for use in the prokaryotic cell of the present invention. The ClosΔNTDPylRS may have the following sequence:

(SEQ ID NO: 37)
MENFTITQTERLKQLNCENDVLELEFEDSEARNSKFREIEIGRVKKGKEN
IKNLLKEKHITISDEVGNKLSDWLMSKDYTKVLTPTIISKDQLKAMTIDE
ENHLFSQVFWIDNNKCLRPMLAPNLYIVMRELKRITNEPVKIFEIGSCFR
KESQGARHMNEFTMLNMVELASVEDGKQLDTLKALAHEAMESLGVESYEL
VIEESAVYGSTLDIEIDGIEVASGSYGPHELDANWDIFDTWVGIGFGIER
LAMAINGGSTIKKYGRSINFIDGETMKL.

[0367] In an embodiment, the synthetase is a variant of ClosΔNTDPylRS further comprising mutations necessary to allow the recognition of, or to alter the specificity for, a non-canonical amino acid. In particular embodiments, the aaRS may be according to SEQ ID NO: 37, comprising any one or a combination of substitutions at the following residues: Y126, M129, Y208. Mutation at the aforementioned residues may be used to generate variants of ClosΔNTDPylRS with altered selectivity to non-canonical amino acids.

[0368] The synthetase may be ClosΔNTDPylRS(CbzK). ClosΔNTDPylRS(CbzK) may be a mutant of ClosΔNTDPylRS comprising the mutations: i) Y126G and M129L, or ii) M129A and Y208F, and is suitable for directing the incorporation of CbzK. ClosΔNTDPylRS(CbzK) may be according to SEQ ID NO: 38 or SEQ ID NO: 39.

[0369] In an embodiment, the aaRS may be at least 50%, 60%, 70%, 80%, 90%, 95%, 99%, or 100% similar or identical to any one of SEQ ID NOs: 37 to 39. The aaRS may be at least 50%, 60%, 70%, 80%, 90%, 95%, 99%, or 100% identical to SEQ ID NO: 37, comprising any one of the following groups: i) Y126G, M129L, and Y208Y, or ii) Y126Y, M129A, or Y208F.

[0370] FIG. 20 provides a sequence alignment. The aaRS may be at least 50%, 60%, 70%, 80%, 90%, 95%, 99%, or 100% identical to any one of SEQ ID NOs: 37 to 39, wherein the variation is found only in residues not marked with: i) “*”; ii) “*” or “:”, or iii) or “*”, “:”, or “.”.

[0371] ClosΔNTDPylRS, and its variants and derivatives, may be paired with a tRNA according to the following sequence:

(ClostRNA; SEQ ID NO: 56)
GGGGAACGGATCGGATGGATCACATAGACTCTAAATCTATGTAGCCGAGT
GAAACTCTCGGGTTCCTCGCCA

[0372] ClostRNA may be modified to include any anticodon. The tRNA may be at least 80%, 90%, 95%, 99%, or 100% identical to SEQ ID NO: 56.

[0373] Another aaRS disclosed herein is an aaRS derived from Methanonatronarchaeum thermophilum (TronΔNTDPylRS). TronΔNTDPylRS is an aaRS suitable for use in the prokaryotic cell of the present invention. The TronΔNTDPylRS may have the following sequence:

(SEQ ID NO: 40)
MEFTVTQKQRLQELGFEGVFPSDFEDVDERNRFFEELVGRLRDRNRKRFE
RLVGNKIPFWRKVSSDLRNRFYELGFVEVRTPEIISYSLLEKMEISDDLR
EQVYWLEEDNRCLRPMLAPNLYNELRHFNRISNQSKVRIFEIGTCFRREK
SSSEHLNEFTMLNAVEMGDIGDTEERLDRLIEEVFGEFTDYKKVGEESSL
YGKTVDVLVDGVEVASCIAGPHPLDSNWSIDQPWVGIGLGVERLAMLLDD
GSTAKAYGNSYIYQDGVRLDIK.

[0374] In an embodiment, the synthetase is a variant of TronΔNTDPylRS further comprising mutations necessary to allow the recognition of, or to alter the specificity for, a non-canonical amino acid.

[0375] In an embodiment, the aaRS may be at least 50%, 60%, 70%, 80%, 90%, 95%, 99%, or 100% similar or identical to SEQ ID NO: 40.

[0376] FIG. 20 provides a sequence alignment. The aaRS may be at least 50%, 60%, 70%, 80%, 90%, 95%, 99%, or 100% identical to SEQ ID NO: 40, wherein the variation is found only in residues not marked with: i) “*”; ii) “*” or “:”, or iii) or “*”, “:” or “.”.

[0377] TronΔNTDPylRS, and its variants and derivatives, may be paired with a tRNA according to the following sequence:

(TrontRNA; SEQ ID NO: 52)
GGGGGGCTGGTCGGGGTGACCACGGAGGCTCTAAACCTCCCTTAGCCGGG
TTCAACTCCCGGGTCCCTCGCCA.

[0378] TrontRNA may be modified to include any anticodon. The tRNA may be at least 80%, 90%, 95%, 99%, or 100% identical to SEQ ID NO: 52.

[0379] Another aaRS disclosed herein is GemmΔNTDPylRS, which is an aaRS from Gemmatimonadetes bacterium (accession no. NNM03691.1). GemmΔNTDPylRS is an aaRS suitable for use in the prokaryotic cell of the present invention. The GemmΔNTDPylRS may have the following sequence:

(SEQ ID NO: 41)
MGITWSKTQKDRLRALRADGARLADSFEGRPQRDQAFQDLEGALAKARRK
ELEDLRAGHGRPGLCRLQTTLEGTLVGAGFVQVATPTIMSRGLLAKMGVT
KNHDLFEQVFWLDRDRCLRPMLAPHLYYVIKDLLRLWEKPLGIFEVGSCF
RKDSQGARHSNEFTMLNLCEFGLPEEDRGGRLREMAEVVTRAAGVHEYEL
EESASTVYGGTLDVVSVDGLELGSGAMGPHPLDHAWRITDTWVGIGFGLE
RLLMTVNRETSIGKMGRSLAYLDGIPLSI.

[0380] In an embodiment, the synthetase is a variant of GemmΔNTDPylRS further comprising mutations necessary to allow the recognition of, or to alter the specificity for, a non-canonical amino acid.

[0381] In an embodiment, the aaRS may be at least 50%, 60%, 70%, 80%, 90%, 95%, 99%, or 100% similar or identical to SEQ ID NO: 41.

[0382] FIG. 20 provides a sequence alignment. The aaRS may be at least 50%, 60%, 70%, 80%, 90%, 95%, 99%, or 100% identical to SEQ ID NO: 41, wherein the variation is found only in residues not marked with: i) “*”; ii) “*” or “:”, or iii) or “*”, “:” or “.”.

[0383] GemmΔNTDPylRS, and derivatives, may paired with the tRNA GemmtRNA. The GemmtRNA may have the following sequence:

(SEQ ID NO: 46)
GGGGAGTGGATCGATACAAGATCGTGTGGGCTCTAAACCCACATAGCTCG
GTGTGACTCCGGGGCTCCCCACCA

[0384] GemmtRNA may be modified to include any anticodon. The tRNA may be at least 80%, 90%, 95%, 99%, or 100% identical to SEQ ID NO: 46.

[0385] Another aaRS disclosed herein is PGA8ΔNTDPylRS, which is an aaRS from Peptostreptococcaceae bacterium pGA-8 (accession no. SFE25427.1). PGA8ΔNTDPylRS is an aaRS suitable for use in the prokaryotic cell of the present invention. The PGA8ΔNTDPylRS may have the following sequence:

(SEQ ID NO: 42)
MQYSNTQRERLVQLNIDASLLEATFEDAEARDASFRSLEKELAKKAKTHL
RSLLSSDAVTGSQAVGNTLCSWLQQKGFTRVDTPTIISDKMLDKMSIDDK
HHLREQVFWIDRHKCLRPMLAPNLYIVMRELKKTLNTPVKIFEMGSCFRK
ESQGARHMNEFTMLNFVELATVKDGEQKEYLEKMAREAMAALKIDDYELI
IEESTVYGTTVDIEIDGIEVASGAYGPHELDSAWAVFDTWVGIGFGIERL
AMAMNGGKTIKRFGRSTNYLDGVPISL.

[0386] In an embodiment, the synthetase is a variant of PGA8ΔNTDPylRS further comprising mutations necessary to allow the recognition of, or to alter the specificity for, a non-canonical amino acid.

[0387] In an embodiment, the aaRS may be at least 50%, 60%, 70%, 80%, 90%, 95%, 99%, or 100% similar or identical to SEQ ID NO: 42.

[0388] FIG. 20 provides a sequence alignment. The aaRS may be at least 50%, 60%, 70%, 80%, 90%, 95%, 99%, or 100% identical to SEQ ID NO: 42, wherein the variation is found only in residues not marked with: i) “*”; ii) “*” or “:”, or iii) or “*”, “:”, or “.”.

[0389] PGA8ΔNTDPylRS, and variants and derivatives, may paired with the tRNA PGA8tRNA. The PGA8tRNA may have the following sequence:

(SEQ ID NO: 54)
GGGGAGTGGATCGTATTGATCGTATGGACTCTAAATCCATAAAGCCGAGT
GAGACTCTCGGACTCCTCGCCA.

[0390] PGA8tRNA may be modified to include any anticodon. The tRNA may be at least 80%, 90%, 95%, 99%, or 100% identical to SEQ ID NO: 54.

[0391] Another aaRS disclosed herein is I2ΔNTDPylRS, which is an aaRS from Desulfosporosinus sp. 12 (accession no. WP_045576271.1). I2ΔNTDPylRS is an aaRS suitable for use in the prokaryotic cell of the present invention. The I2ΔNTDPylRS may have the following sequence:

(SEQ ID NO: 43)
MGIIWTPIQKQRLQELNASEAQREMCFESQQARDRAFQEQEHSLVVEGKR
RLMELRDIKRRPSLSVLEQQLVEALTQQGFVQVVTPTIISKTSLAKMSVS
DDHPLFSQVFWLDSKRCLRPMLAPNLYTLWKDLLRLWEKPIRIFEIGTCY
RKESKGSLHLNEFTMLNLTELGLPEDQRHQRLEELASLVMETVGIADYEM
ELTTSVVYGDTLDVVKGIELGSSAMGPHPLDDQWGIIDPWVGIGFGLERL
LMIKEGSQNVQSMGRSLTYLNGVRLNI.

[0392] In an embodiment, the synthetase is a variant of I2ΔNTDPylRS further comprising mutations necessary to allow the recognition of, or to alter the specificity for, a non-canonical amino acid.

[0393] In an embodiment, the aaRS may be at least 50%, 60%, 70%, 80%, 90%, 95%, 99%, or 100% similar or identical to SEQ ID NO: 43.

[0394] FIG. 20 provides a sequence alignment. The aaRS may be at least 50%, 60%, 70%, 80%, 90%, 95%, 99%, or 100% identical to SEQ ID NO: 43, wherein the variation is found only in residues not marked with: i) “*”; ii) “*” or “:”, or iii) or “*”, “:” or “.”.

[0395] I2ΔNTDPylRS, and derivatives, may paired with any of the following tRNAs:

(I2CUAG; SEQ ID NO: 47)
GGGGGGTAGATCGGATTGATCGCGTGGACTCTAAATCCGCGCTAGACGGG
TGAAACTCCCGTACTCCTCGCCA
(I2b8; SEQ ID NO: 48)
GGGGCGTCGATCGGATTGATCGCGTGGACTCTAAATCCGCGCGCAACGGG
TGAAACTCCCGTACGCCTCGCCA
(I2b32; SEQ ID NO: 49)
GGGGTGTTGATCGGATTGATCGCGTGGACTCTAAATCCGCGGTAGACGGG
TGAAACTCCCGTACACCTCACCA
(I2b72; SEQ ID NO: 50)
GGGGTGTAGATCGGATTGATCGCGTGGACTCTAAATCCGCGAACAACGGG
TGAAACTCCCGTACACCTCGCCA
(I2H52; SEQ ID NO: 51)
GGGGCGTTGATCGGATTGATCGCGTGGACTCTAAATCCGCGGCCGACGGG
TGAAACTCCCGTACACCTCTCCA
(I2; SEQ ID NO: 55)
GGGGGGTAGATCGGATTGATCGCGTGGACTCTAAATCCGCGTAGACGGGT
GAAACTCCCGTACTCCTCGCCA

[0396] SEQ ID NOs: 47 to 51 and 55 may be modified to include any anticodon. The tRNA may be at least 80%, 90%, 95%, 99%, or 100% identical to any one of 47 to 51 and 55.

[0397] Another aaRS disclosed herein is D121ΔNTDPylRS, which is an aaRS from a Deltaproteobacteria (accession no. RLC04121.1). D121ΔNTDPylRS is an aaRS suitable for use in the prokaryotic cell of the present invention. The D121ΔNTDPylRS may have the following sequence:

(SEQ ID NO: 44)
MIPWTQTQTQRLNELNAPDSALKKSFDGEPAREKAYQALEKSLVTTQRRR
LAEFQTTHRRPELCRLENKLAEMLTQDGFAQVTTPIIMSRGLLKKMSIDS
KHPLNSQIFWLQEDKCLRPMLAPHLYYLLVDLLRIWKRPVRIFEIGPCFR
KESRGSKHASEFTMLNLVEMGTPENTRRERIQDVGSRVATAAGVKNYRFE
TVTSEIYGDTIDIVAGKDGLEIASAAMGPHPLDRPWKINESWIGIGFGLE
RLLMASHRSRNLARFGRSLAYLDGVRLNI.

[0398] In an embodiment, the synthetase is a variant of D121ΔNTDPylRS further comprising mutations necessary to allow the recognition of, or to alter the specificity for, a non-canonical amino acid.

[0399] In an embodiment, the aaRS may be at least 50%, 60%, 70%, 80%, 90%, 95%, 99%, or 100% similar or identical to SEQ ID NO: 44.

[0400] FIG. 20 provides a sequence alignment. The aaRS may be at least 50%, 60%, 70%, 80%, 90%, 95%, 99%, or 100% identical to SEQ ID NO: 44, wherein the variation is found only in residues not marked with: i) “*”; ii) “*” or “:”, or iii) or “*”, “:” or “.”.

[0401] D121ΔNTDPylRS, and derivatives, may paired with the following tRNA:

(SEQ ID NO: 57)
GGGGGGTGGATCGTAATGAGATCGTGTGGACTCTAAATCCACATAGACGG
GTGCAACTCCCGTACTCCCCGCCA

[0402] SEQ ID NO: 57 may be modified to include any anticodon. The tRNA may be at least 80%, 90%, 95%, 99%, or 100% identical to SEQ ID NO: 57.

[0403] Another aaRS disclosed herein is D416ΔNTDPylRS, which is an aaRS from a Deltaproteobacteria (accession no. RTZ99416.1). D416ΔNTDPylRS is an aaRS suitable for use in the prokaryotic cell of the present invention. The D416ΔNTDPylRS may have the following sequence:

(SEQ ID NO: 45)
MNSSWTEVQRHRLKELNGAEKDLETAFGDDLQRNRAFQKLEKQLVYQERK
RLDRLLDTRFRPLRCELESLLIDALKCEGFTRVETPTIISQNDLERMSID
RSHPFNDQVYRVDSKHCLRPMLAPGLYRLMKDLARIRSGKPVRIFEIGPC
FRKETSGARHAGEFTMLNLVEMRIEKGSRRFRIETLAKRIMHAAGIDTYD
LVDEPSEVYNTTLDIVCGSDPLEVASCAMGPHPLDAAWGIIDTWVGLGFG
LERLLMARENSPGIGKWCKSVSYLDGIRLTL.

[0404] In an embodiment, the synthetase is a variant of D416ΔNTDPylRS further comprising mutations necessary to allow the recognition of, or to alter the specificity for, a non-canonical amino acid.

[0405] In an embodiment, the aaRS may be at least 50%, 60%, 70%, 80%, 90%, 95%, 99%, or 100% similar or identical to SEQ ID NO: 45.

[0406] FIG. 20 provides a sequence alignment. The aaRS may be at least 50%, 60%, 70%, 80%, 90%, 95%, 99%, or 100% identical to SEQ ID NO: 45, wherein the variation is found only in residues not marked with: i) “*”; ii) “*” or “:”, or iii) or “*”, “:”, or “.”.

[0407] D416ΔNTDPylRS, and derivatives, may paired with the following tRNA:

(SEQ ID NO: 58)
GGGGAGTGGATCGGATGAGATCGCATGGGCTCTAAACCCATGTAGCCGGG
TGCGACTCCCGGGCTTCCCTCCA

[0408] SEQ ID NO: 58 may be modified to include any anticodon. The tRNA may be at least 80%, 90%, 95%, 99%, or 100% identical to SEQ ID NO: 58.

[0409] In particular embodiments, any of the aaRSs disclosed herein may be modified to allow the recognition of, or to alter the specificity for, any of AllocK, AlkK, BocK, Bta, CbzK, CypK, 3-Nitro-Tyr, NMH, p-I-Phe, and p-Az-Phe, and o-Methyl-Tyrosine.

[0410] In an aspect of the invention, there is provided a host cell comprising any aaRS, or variant or derivative thereof, disclosed herein and any tRNA, or variant or derivative thereof, disclosed herein, wherein the aaRS and tRNA form an orthogonal aminoacyl-tRNA synthetase-tRNA pair. The host cell may be any suitable for heterologous protein production, in particular the production of polypeptides comprising one or more non-canonical amino acids. The host cell may be a prokaryotic or a eukaryotic cell. The host cell may be a bacterial cell, such as E. coli. The host cell may be a eukaryotic cell, such as a mammalian or insect cell line. The host cell may be a human cell. The host cell may be any bacterium of the invention as disclosed herein.

[0411] The aaRSs and tRNAs are also provided herein in the isolated forms.

[0412] The present inventors provide data herein demonstrating that the following orthogonal tRNA synthetase-tRNA pairs may be used in any combination of two or three pairs: i) MmPylRS/MmtRNA^{Pyl}_{YYY}; ii) 1R26PylRS/AlvtRNA^{ΔNPyl(8)}_{YYY}; iii) and AfTyrRS/Af-tRNA^{Tyr(A01)}_{YYY}.

[0413] Thus, in an aspect of the invention, there is provided a host cell comprising: any one, two, or three orthogonal tRNA synthetase-tRNA pairs selected from the group: i) MmPylRS/MmtRNA^{Pyl}_{YYY}; ii) 1R26PylRS/AlvtRNA^{ΔNPyl(8)}_{YYY}; iii) and AfTyrRS/Af-tRNA^{Tyr(A01)}_{YYY}. The aaRSs may be modified to allow the recognition of or alter the specificity for a non-canonical amino acid. The aaRSs may be any of the variants disclosed herein. The tRNAs may be any of the variants disclosed herein.

[0414] The present inventors provide data herein demonstrating that the following orthogonal tRNA synthetase-tRNA pairs may be used in any combination of two or three pairs: i) MmPylRS/MmtRNA^{Pyl}_{YYY}; ii) 1R26PylRS/AlvtRNA^{ΔNPyl(8)}_{YYY}; iii) and MjTyrRS/MjtRNA^{Tyr}_{YYY}.

[0415] Thus, in an aspect of the invention, there is provided a host cell comprising: any one, two, or three orthogonal tRNA synthetase-tRNA pairs selected from the group: i) MmPylRS/MmtRNA^{Pyl}_{YYY}; ii) 1R26PylRS/AlvtRNA^{ΔNPYl(8)}_{YYY}; iii) and MjTyrRS/MjtRNA^{Tyr}_{YYY}. The aaRSs may be modified to allow the recognition of or alter the specificity for a non-canonical amino acid. The aaRSs may be any of the variants disclosed herein. The tRNAs may be any of the variants disclosed herein.

[0416] In another aspect of the invention, there is provided a host cell comprising any one, two, or three orthogonal tRNA synthetase-tRNA pairs selected from the group: i) a class A ΔNPylRS/^{ΔNPyl}tRNA pair; ii) a class B ΔNPylRS/^{ΔNPyl}tRNA pair; and iii) an MmPylRS/Spe^{Pyl}tRNA pair. The classes of aaRS and tRNA are as described in Dunkelmann et al. (Engineered triply orthogonal pyrrolysyl-tRNA synthetase/tRNA pairs enable the genetic encoding of three distinct non-canonical amino acids, 2020).

[0417] The orthogonal tRNA synthetase-tRNA pairs may be expressed in a host cell. The host cell may be any suitable for heterologous protein production, in particular the production of polypeptides comprising one or more non-canonical amino acids. The host cell may be a prokaryotic or a eukaryotic cell. The host cell may be a bacterial cell, such as E. coli. The host cell may be a eukaryotic cell, such as a mammalian or insect cell line. The host cell may be a human cell. The host cell may be any bacterium of the invention as disclosed herein.

[0418] There is provided herein a bacterium that comprises a genome which comprises a polynucleotide sequence that is at least 80%, 85%, 90%, 95%, 98%, 99%, 99.5%, 99.8%, 99.9%, or 100% identical to SEQ ID NO: 8, and wherein the bacterium comprises a first orthogonal aminoacyl-tRNA synthetase-tRNA pair capable of decoding the sense codon TCG, a second orthogonal aminoacyl-tRNA synthetase-tRNA pair capable of decoding the sense codon TCA, and a third orthogonal aminoacyl-tRNA synthetase-tRNA pair capable of decoding the stop codon TAG. The calculation of the sequence identity of the genome should exclude the sequences required for expression of the orthogonal aminoacyl-tRNA synthetase-tRNA pairs (i.e. the bacterium may be of the strain Syn61Δ3(ev5), further modified to express the orthogonal aminoacyl-tRNA synthetase-tRNA pairs). In an embodiment, the orthogonal tRNA synthetase-tRNA pairs are: i) MmPylRS/MmtRNA^{Pyl}_{YYY}; ii) 1R26PylRS/AlvtRNA^{ΔNPyl(8)}_{YYY}; and iii) and AfTyrRS/Af-tRNA^{Tyr(A01)}_{CUA}, wherein the MmtRNA^{Pyl}_{YYY} may be MmtRNA^{Pyl}_{UGA}, the 1R26PylRS may be 1R26PylRS(CbzK), the AlvtRNA^{ΔNPyl(8)}_{YYY} may be AlvtRNA^{ΔNPyl(8)}_{CGA}, and the AfTyrRS may be AfTyrRS(p-I-Phe). In another embodiment, the orthogonal tRNA synthetase-tRNA pairs are: i) MmPylRS/MmtRNA^{Pyl}_{YYY}; ii) 1R26PylRS/AlvtRNA^{ΔNPyl(8)}_{YYY}; iii) and MjTyrRS/MjtRNA^{Tyr}_{CUA}, wherein the MmtRNA^{Pyl}_{YYY} may be MmtRNA^{Pyl}_{UGA}, the 1R26PylRS may be 1R26PylRS(CbzK), the AlvtRNA^{ΔNPyl(8)}_{YYY} may be AlvtRNA^{ΔNPyl(8)}_{CGA}, and the MjTyrRS may be MjTyrRS(3-Nitro-Tyr) or MjTyrRS(p-Az-Phe).

[0419] The substrate of the orthogonal tRNA synthetases that are expressed in prokaryotic cell of the invention may be any non-canonical amino acid. Hence, the prokaryotic cell of the invention may be used to generate polymers comprising a first non-canonical amino acid, a second non-canonical amino acid, and optionally a third non-canonical amino acid.

[0420] As used herein, the term “non-canonical amino acid” means any amino acid excluding L-alanine, L-cysteine, L-aspartic acid, L-glutamic acid, L-phenylalanine, glycine, L-histidine, L-isoleucine, L-lysine, L-leucine, L-methionine, L-asparagine, L-proline, L-glutamine, L-arginine, L-serine, L-threonine, L-valine, L-tryptophan, and L-tyrosine.

[0421] The non-canonical amino acid may be an unnatural amino acid. As used herein, an “unnatural amino acid” is any amino acid that is not naturally encoded or found in the genetic code. Such amino acids may be non-proteinogenic amino acids. Thus, an unnatural amino acid may be any amino acid excluding L-alanine, L-cysteine, L-aspartic acid, L-glutamic acid, L-phenylalanine, glycine, L-histidine, L-isoleucine, L-lysine, L-leucine, L-methionine, L-asparagine, L-proline, L-glutamine, L-arginine, L-serine, L-threonine, L-valine, L-tryptophan and L-tyrosine, L-pyrrolysine, and L-selenocysteine.

[0422] The non-canonical amino acids that are suitable for use with the present invention are not particularly limited. Suitable non-canonical amino acids will be well known to those of skill in the art, for example those disclosed in Neumann, H., 2012. FEBS letters, 586(15), pp. 2057-2064; and Liu, C. C. and Schultz, P. G., 2010. Annual review of biochemistry, 79, pp. 413-444 (herein incorporated by reference). In some embodiments the non-canonical amino acids are selected from one or more of: p-Acetylphenylalanine, m-Acetylphenylalanine, O-allyltyrosine, Phenylselenocysteine, selenocysteine, p-Propargyloxyphenylalanine, p-Azidophenylalanine, p-Boronophenylalanine, O-methyltyrosine, p-Aminophenylalanine, p-Cyanophenylalanine, m-Cyanophenylalanine, p-Fluorophenylalanine, p-Iodophenylalanine, p-Bromophenylalanine, p-Nitrophenylalanine, L-DOPA, 3-Aminotyrosine, 3-Iodotyrosine, p-Isopropylphenylalanine, 3-(2-Naphthyl)alanine, Biphenylalanine, Homoglutamine, D-tyrosine, p-Hydroxyphenyllactic acid, 2-Aminocaprylic acid, Bipyridylalanine, HQ-alanine, p-Benzoylphenylalanine, o-Nitrobenzylcysteine, o-Nitrobenzylserine, 4,5-Dimethoxy-2-nitrobenzylserine, o-Nitrobenzyllysine, o-Nitrobenzyltyrosine, 2-Nitrophenylalanine, Dansylalanine, p-Carboxymethylphenylalanine, 3-Nitrotyrosine, Sulfotyrosine, Acetyllysine, Methylhistidine, 2-Aminononanoic acid, 2-Aminodecanoic acid, Pyrrolysine, Cbz-lysine, Boc-lysine, Allyloxycarbonyllysine, N^{ε}-((tert-butoxy)carbonyl)-L-lysine (BocK), NE-(carbobenzyloxy)-L-lysine (CbzK), N^{ε}-allyloxycarbonyl-L-lysine (AllocK), (S)-2-Amino-3-(4-iodophenyl)propanoic acid (p-I-Phe), CypK, AlkK, 3-Nitro-Tyr, and p-Az-Phe. The first, second, and third non-canonical amino acid may be any combination of the aforementioned non-canonical amino acids.

[0423] In particular embodiments, the non-canonical amino acid may be any one of BocK, CbzK, AllocK, p-I-Phe, CypK, AlkK, 3-Nitro-Tyr, and p-Az-Phe (see Fig. S9). The first, second, and third non-canonical amino acid may be any combination of BocK, CbzK, AllocK, p-I-Phe, CypK, AlkK, 3-Nitro-Tyr, and p-Az-Phe.

### Uses of the Prokaryotic Cells of the Invention

[0424] The prokaryotic cells of the invention may be used to synthesise polymers or proteins that include a first, second, and/or third non-canonical amino acid. In particular embodiments, the prokaryotic cells of the invention may be used to synthesise polymers or proteins that include two or three different types of non-canonical amino acid. The non-canonical amino acids may be any as disclosed herein.

[0425] Thus, in an aspect of the invention, there is provided a method of synthesising a polymer, comprising:
[0426] i) providing a prokaryotic cell of the invention, wherein the prokaryotic cell comprises a first orthogonal aminoacyl-tRNA synthetase-tRNA pair; and contacting said prokaryotic cell with a nucleic acid sequence encoding a polymer, said nucleic acid sequence comprising the first type of sense codon;
[0427] ii) incubating the prokaryotic cell in the presence of a first non-canonical amino acid, wherein the first non-canonical amino acid is a substrate for the first orthogonal aminoacyl-tRNA synthetase; and
[0428] iii) incubating the prokaryotic cell to allow incorporation of the first non-canonical amino acid into the polymer via the first orthogonal aminoacyl-tRNA synthetase-tRNA pair.

[0429] In a particular embodiment, there is provided a method of synthesising a polymer, comprising:
[0430] i) providing a prokaryotic cell of the invention, wherein the prokaryotic cell comprises first and second orthogonal aminoacyl-tRNA synthetase-tRNA pairs; and contacting said prokaryotic cell with a nucleic acid sequence encoding a polymer, said nucleic acid sequence comprising the first type of sense codon and/or the second type of sense codon;
[0431] ii) incubating the prokaryotic cell in the presence of a first and a second non-canonical amino acid, wherein the first non-canonical amino acid is a substrate for the first orthogonal aminoacyl-tRNA synthetase and the second non-canonical amino acid is a substrate for the second orthogonal aminoacyl-tRNA synthetase; and
[0432] iii) incubating the prokaryotic cell to allow incorporation of the first non-canonical amino acid into the polymer via the first orthogonal aminoacyl-tRNA synthetase-tRNA pair and the incorporation of the second non-canonical amino acid into the polymer via the second first orthogonal aminoacyl-tRNA synthetase-tRNA pair.

[0433] In an embodiment, there is provided a method of synthesising a polymer, comprising: i) providing a prokaryotic cell of the invention, wherein the prokaryotic cell comprises first, second, and third orthogonal aminoacyl-tRNA synthetase-tRNA pairs; and contacting said prokaryotic cell with a nucleic acid sequence encoding a polymer, said nucleic acid sequence comprising a first type of sense codon, a second type of sense codon, and/or a first type of stop codon;
[0434] ii) incubating the prokaryotic cell in the presence of a first, a second, and a third non-canonical amino acid, wherein the first non-canonical amino acid is a substrate for the first orthogonal aminoacyl-tRNA synthetase, the second non-canonical amino acid is a substrate for the second orthogonal aminoacyl-tRNA synthetase, and the third non-canonical amino acid is a substrate for the third orthogonal aminoacyl-tRNA synthetase;
[0435] iii) incubating the prokaryotic cell to allow incorporation of the first non-canonical amino acid into the polymer via the first orthogonal aminoacyl-tRNA synthetase-tRNA pair, incorporation of the second non-canonical amino acid into the polymer via the second first orthogonal aminoacyl-tRNA synthetase-tRNA pair, and/or incorporation of the third non-canonical amino acid into the polymer via the third first orthogonal aminoacyl-tRNA synthetase-tRNA pair.

[0436] The contacting of the prokaryotic cell with the nucleic acid sequence may take any form that would provide the nucleic acid to the prokaryotic cell such that the nucleic acid sequence may be decoded to produce a polymer, such as a protein.

[0437] The prokaryotic cells for use in the present method may be any as described herein, wherein the prokaryotic cells comprise first and, optionally, second orthogonal aminoacyl-tRNA synthetase-tRNA pairs and, optionally, the third orthogonal aminoacyl-tRNA synthetase-tRNA pair. For instance, in an embodiment, the prokaryotic cell for use in the present method is a prokaryotic cell that does not express a first endogenous tRNA, a second endogenous tRNA, and a first endogenous release factor; and wherein a first type of sense codon and a second type of sense codon have been recoded within the genome of the prokaryotic cell such that the first endogenous tRNA and the second endogenous tRNA are dispensable, and a first type of stop codon has been recoded within the genome of the prokaryotic cell such that the first endogenous release factor is dispensable. The nature of the recoding may be as described for any prokaryotic cell of the invention disclosed herein. The first orthogonal tRNA is capable of decoding the first type of sense codon, the second orthogonal tRNA is capable of decoding the second type of sense codon, and the third orthogonal tRNA is capable of decoding the first type of stop codon. The prokaryotic cell may be E. coli.

[0438] In a particular embodiment, the prokaryotic cell for use in the present method is an E. coli cell that does not express tRNA^{Ser}_{UGA}, tRNA^{Ser}_{CGA}, or RF-1, occurrences of the sense codon TCA have been recoded such that tRNA^{Ser}_{UGA} is dispensable (e.g. occurrences of TCA in essential genes of the parent strain have been replaced with AGT), occurrences of the sense codon TCG have been recoded such that tRNA^{Ser}_{CGA} is dispensable (e.g. occurrences of TCG in essential genes of the parent strain have been replaced with AGC), and occurrences of the stop codon TAG have been recoded such that RF-1 is dispensable (e.g. occurrences of TAG in essential genes of the parent strain have been replaced with TAA). The bacterium has been modified to include first, second, and third orthogonal aminoacyl-tRNA synthetase-tRNA pairs capable of decoding the TCA, TCG, and TAG codons and capable of incorporating a first, second, and third non-canonical amino acid into such sites during polymer formation.

[0439] In particular embodiments, the prokaryotic cell for use in the present method is Syn61Δ3, Syn61Δ3(ev3), Syn61Δ3(ev4), or Syn61Δ3(ev5). As such, the prokaryotic cell may comprise a genome which is at least 80%, 85%, 90%, 95%, 98%, 99%, 99.5%, 99.8%, 99.9%, or 100% identical to any one of: SEQ ID NOs: 5 to 8. The calculation of the sequence identity percentage excludes any sequence that has been inserted to enable the expression of the orthogonal aminoacyl-tRNA synthetase-tRNA pairs.

[0440] The orthogonal tRNA synthetase-tRNA pairs may be any as described herein.

[0441] In particular embodiments the orthogonal tRNA synthetase-tRNA pairs are: MmPylRS/MmtRNA^{Pyl}_{YYY}; 1R26PylRS/AlvtRNA^{ΔNPyl(8)}_{YYY}; and AfTyrRS/Af-tRNA^{Tyr(A01)}_{YYY}. The MmtRNA^{Pyl}_{YYY} may be MmtRNA^{Pyl}_{UGA}. The 1R26PylRS may be 1R26PylRS(CbzK). The AlvtRNA^{ΔNPyl(8)}_{YYY} may be AlvtRNA^{ΔNPyl(8)}_{CGA}. The AfTyrRS may be AfTyrRS(p-I-Phe). The Af-tRNA^{Tyr(A01)}_{YYY} may be Af-tRNA^{Tyr(A01)}_{CUA}.

[0442] In other embodiments the orthogonal tRNA synthetase-tRNA pairs are: MmPylRS/MmtRNA^{Pyl}_{YYY}; 1R26PylRS/AlvtRNA^{ΔNPyl(8)}_{YYY}; and MjTyrRS/MjtRNA^{Tyr}_{YYY}. The MmtRNA^{Pyl}_{YYY} may be MmtRNA^{Pyl}_{UGA}. The 1R26PylRS may be 1R26PylRS(CbzK). The AlvtRNA^{ΔNPyl(8)}_{YYY} may be AlvtRNA^{ΔNPyl(8)}_{CGA}. The MjTyrRS may be MjTyrRS(3-Nitro-Tyr) or MjTyrRS(p-Az-Phe). The MjtRNA^{Tyr}_{YYY} may be MjtRNA^{Tyr}_{CUA}.

[0443] Fig. S5 presents data relating to the use of Syn61Δ3(ev5) to create proteins containing an ncAA in response to a sense codon or stop codon. As a control, MDS42 cells were also used create proteins containing a ncAA in response to a stop codon. As can be seen from this figure, the yield of the reporter protein containing an ncAA incorporated in response to an amber codon (as a ratio compared to wt) was vastly improved for Syn61Δ3(ev5) over the control. As such, the presently disclosed prokaryotic cells and methods of using said prokaryotic cells are surprising improvements over the prior art, even where producing the same product.

[0444] Further data relating to protein yields are provided in Table 1 (Data file S4).

[0445] Prokaryotic cells, e.g. E. coli, are not typically able to incorporate most eukaryotic post-translational modifications, such as ubiquitination, glycosylation and phosphorylation, nor are they typically capable of other eukaryotic maturation processes, and proteolytic protein maturation. In addition, correct disulphide bond formation and lipolysaccharide contaminations can be troublesome (see Ovaa, H., 2014. Frontiers in chemistry, 2, p. 15). However, therapeutic proteins, such as antibodies, enzymes and cytokines commonly carry post-translational modifications and disulphide bonds, and often require proteolytic maturation to attain their correctly folded state. Thus, the majority of therapeutic proteins are produced in eukaryotic and mammalian cell systems. However, expression in prokaryotic cells e.g. E. coli is in general cheaper, more susceptible to genetic modifications, and versatile with regard to mutant library development, and suitable for industrial scale fermentation (Ovaa, H., 2014. Frontiers in chemistry, 2, p. 15).

[0446] Thus, in some embodiments the synthesised polymers are therapeutic polypeptides, optionally wherein mammalian protein modifications have been introduced via one or more non-canonical amino acids. The synthesised polymer may be a protein, such as a therapeutic protein, comprising at least three distinct types of non-canonical amino acid.

[0447] Experimental data are provided herein that indicate that the prokaryotic cells of the invention may be used to generate polymers containing first, second and third non-canonical amino acids, each of which may differ from the others. Surprisingly, the inventors show that polymers may be produced that contain non-canonical amino acids that are directly adjacent to each other. In fact, the polymers may even contain only non-canonical amino acids. While it was known that ribosomes were able to tolerate one non-canonical amino acid at a time, it has never been shown that two non-canonical amino acids simultaneously within the same ribosome would allow productive peptide synthesis. As discussed in the Examples, for a linear polymer composed of two distinct monomers (A and B) there are four elementary polymerization steps (A+B->AB, B+A->BA, A+A->AA, B+B->BB) from which any sequence can be composed (FIG. 5A). For ribosome-mediated polymerization these four elementary steps correspond to each monomer acting as an A-site or P-site substrate to form a bond with another copy of the same monomer or with a distinct monomer (FIG. 5A). The experimental data presented in the Examples are the first, to the inventors' knowledge, to show that each of these four polymerization steps is possible.

[0448] Thus, in some embodiments the synthesised polymers, polypeptides, or proteins may include at least one non-canonical amino acid directly adjacent to another non-canonical amino acid. This polymer, polypeptide, or protein may include a chain of two, three, four, five, six, seven, eight, nine, ten, 15, 20, or more non-canonical amino acids directly adjacent to each other. The chain may comprise two or three distinct non-canonical amino acids.

[0449] In some embodiments, a polypeptide may be excisable from the synthesised polymer. For instance, the nucleic acid may encode cleavage or cleavable sites either side of the intended product. The excised product may be entirely made of non-canonical amino acids or may comprise one or more canonical amino acid. The excised product may be the chain of non-canonical amino acids described herein.

[0450] The synthesised polymer, including the linear or cyclic polymers, or protein may be purified after the method of synthesis. The purification may take any form known in the art in order to separate the polymer or protein from the cells and culture in which it was made.

[0451] The inventors demonstrate herein the use of prokaryotic cells of the invention for the production of cyclic polymers. The cyclic polymers may be generated via the synthesis of a polymer, as described herein, wherein the polymer is capable of self-cyclisation. The method may comprise the excision of a peptide from the polymer, wherein the peptide is capable of self-cyclisation. Said self-cyclisation may be a part of the excision process, but is not required to be so. The final product may be a macrocycle.

[0452] The macrocycle may include four, five, six, seven, eight, nine, ten, 15, 20, or more monomers. The macrocycle may include at least a first, second, and third non-canonical amino acid.

[0453] The prokaryotic cells of the invention can be used to generate products that are not obtainable by any other methods. As such, in an aspect of the invention, there is provided a polymer obtained from or obtainable by the methods of the invention. In an embodiment, the polymer comprises at least one first non-canonical amino acid, at least one second non-canonical amino acid, and optionally at least one third non-canonical amino acid, wherein the first, second, and third non-canonical amino acids are different from each other. The polymer may comprise least one non-canonical amino acid directly adjacent to another non-canonical amino acid. The polymer may include a chain of two, three, four, five, six, seven, eight, nine, ten, 15, 20, or more non-canonical amino acids directly adjacent to each other. The polymer may be a macrocycle or may be linear. Macrocycles of the present invention may comprise four, five, six, seven, eight, nine, ten or more monomers.

[0454] The prokaryotic cells of the invention may be suitable for the production of a target polymer or protein incorporating at least one non-canonical amino acid, wherein the rate of production is at least 5%, 10%, 15%, 25%, 35%, 50%, 60%, 70%, 80%, 90%, 100%, 110%, or 140% of the rate of production of the wild type control.

[0455] The prokaryotic cells of the invention may be suitable for the production of a target polymer or protein incorporating at least one non-canonical amino acid, wherein yield is at least 0.5, 1, 2, 5, 7.5, 10, 15, 20, or 25 mg/l.

### Methods of Making the Prokaryotic Cells of the Invention

[0456] Methods are provided herein for generating the prokaryotic cells of the invention. Aspects of said methods provide surprisingly effective processes for generating said prokaryotic cells and result in prokaryotic cells with surprisingly beneficial properties.

[0457] Thus, in an aspect of the invention, there is provided a method for producing a prokaryotic cell, wherein the method comprises:
[0458] (i) modifying a prokaryotic cell to express a first orthogonal aminoacyl-tRNA synthetase-tRNA pair suitable for decoding a first type of sense codon, wherein
   [0459] the prokaryotic cell comprises a genome wherein the first type of sense codon has been recoded such that a first endogenous tRNA is dispensable;
[0460] (ii) incubating the prokaryotic cell in the presence of a non-canonical amino acid which is a substrate for the first orthogonal aminoacyl-tRNA synthetase; and
[0461] (iii) modifying the endogenous gene encoding the first endogenous tRNA such that the first endogenous tRNA is not expressed.

[0462] Steps (ii) and (iii) may be performed before step (i).

[0463] In a particular embodiment, steps (i) and (ii) of the above method are performed before step (iii). The inventors have discovered that this particular order is surprisingly effective, and the prokaryotic cells have improved growth during the method. Without being bound to theory, the inventors hypothesise that the beneficial effects arise from a reduction in stalling on unannotated sense codons that may remain in the genome, hence this particular order of steps relieves this stalling and improves growth.

[0464] In a particular embodiment, there is provided a method for producing a prokaryotic cell, wherein the method comprises:
[0465] (i) modifying a prokaryotic cell to express a first orthogonal aminoacyl-tRNA synthetase-tRNA pair suitable for decoding a first type of sense codon, wherein
   [0466] the prokaryotic cell comprises a genome wherein the first type of sense codon has been recoded such that a first endogenous tRNA is dispensable;
[0467] (ii) incubating the prokaryotic cell in the presence of a non-canonical amino acid which is a substrate for the first orthogonal aminoacyl-tRNA synthetase; and
[0468] (iii) modifying the endogenous gene encoding the first endogenous tRNA such that the first endogenous tRNA is not expressed; and
[0469] (a) modifying the prokaryotic cell to express a second orthogonal aminoacyl-tRNA synthetase-tRNA pair suitable for decoding a second type of sense codon, wherein
   [0470] the prokaryotic cell comprises a genome wherein the second type of sense codon has been recoded such that a second endogenous tRNA is dispensable;
[0471] (b) incubating the prokaryotic cell in the presence of a non-canonical amino acid which is a substrate for the second orthogonal aminoacyl-tRNA synthetase; and
[0472] (c) modifying the endogenous gene encoding the second endogenous tRNA such that the second endogenous tRNA is not expressed.

[0473] The modifying of the endogenous gene encoding the first or second endogenous tRNA such that the first or second endogenous tRNA is not expressed, may be according to any technique that would prevent the production of a functional form of the endogenous tRNA within the prokaryotic cell. The functional form of an endogenous tRNA is a form that that would allow the decoding of the tRNAs cognate codon(s). For instance, the endogenous gene may be deleted or a portion of the gene may be deleted to prevent expression. Regulatory sequences may be deleted or altered to prevent expression. Alternatively, nonsense, frameshift, or missense mutations may prevent expression of the tRNA in a functional form.

[0474] Steps (ii) and (iii) may be performed before step (i), and steps (b) and (c) may be performed before step (a).

[0475] In a particular embodiment, steps (i) and (ii) of the above method are performed before step (iii). In addition, or alternatively, steps (a) and (b) may be performed before step (c). The inventors have discovered that this particular order is surprisingly effective, and the prokaryotic cells have improved growth during the method. Without being bound to theory, the inventors hypothesise that the beneficial effects arise from a reduction in stalling on unannotated sense codons that may remain in the genome, hence this particular order of steps relieves this stalling and improves growth.

[0476] The steps to introduce the second orthogonal tRNA synthetase-tRNA pair with the deletion of the dispensable endogenous tRNA (steps (a), (b), and (c)) may be performed before, at the same time, or after the steps to introduce the first orthogonal tRNA synthetase-tRNA pair and deleted the first endogenous tRNA ((steps (i), (ii), and (iii)).

[0477] In an embodiment, the method further comprises modifying the prokaryotic cell to express a third orthogonal aminoacyl-tRNA synthetase-tRNA pair suitable for decoding a first type of stop codon, wherein the first type of stop codon has been recoded within the genome of the prokaryotic cell such that a first endogenous release factor is dispensable.

[0478] This may be applied to any prokaryotic cell comprising a recoded genome with reduced occurrences of a first and second type of sense codon as discussed herein. For instance, the essential genes (as discussed herein) may not contain occurrences of the first or second type of sense codon. Alternatively, or in addition, the genome may comprise 5, 4, 3, 2, 1, or no occurrences of the first or second type of sense codon.

[0479] The method may further comprise modifying the prokaryotic cell to express a third orthogonal aminoacyl-tRNA synthetase-tRNA pair suitable for decoding a first type of stop codon, wherein a first type of stop codon has been recoded within the genome of the prokaryotic cell such that a first endogenous release factor is dispensable. This may be applied to any prokaryotic cell comprising a recoded genome with reduced occurrences of a first type of stop codon as discussed herein. For instance, the essential genes (as discussed herein) may not contain occurrences of the first type of stop codon. Alternatively, or in addition, the genome may comprise 5, 4, 3, 2, 1, or no occurrences of the first type of stop codon.

[0480] The methods for producing a prokaryotic cell may be, for instance, applied to an E. coli cell that does not express tRNA^{Ser}_{UGA}, tRNA^{Ser}_{CGA}, or RF-1, wherein occurrences of the sense codon TCA have been recoded such that tRNA^{Ser}_{UGA} is dispensable (e.g. occurrences of TCA in essential genes of the parent strain have been replaced with AGT), occurrences of the sense codon TCG have been recoded such that tRNA^{Ser}_{CGA} is dispensable (e.g. occurrences of TCG in essential genes of the parent strain have been replaced with AGC), and occurrences of the stop codon TAG have been recoded such that RF-1 is dispensable (e.g. occurrences of TAG in essential genes of the parent strain have been replaced with TAA).

[0481] In particular, the methods may be applied to Syn61, Syn61(ev1), or Syn61(ev2). As such, the methods may be applied to a bacterium that comprises a genome which is at least 80%, 85%, 90%, 95%, 98%, 99%, 99.5%, 99.8%, 99.9%, or 100% identical to any one of: GenBank accession number CP040347.1, SEQ ID NO: 3, or SEQ ID NO: 4.

[0482] The orthogonal tRNA synthetase-tRNA pairs inserted into the cells may be any suitable pairs, including any as described herein.

[0483] In particular embodiments the orthogonal tRNA synthetase-tRNA pairs are: MmPylRS/MmtRNA^{Pyl}_{YYY}; 1R26PylRS/AlvtRNA^{ΔNPyl(8)}_{YYY}; and AfTyrRS/Af-tRNA^{Tyr(A01)}_{CUA}. The MmtRNA^{Pyl}_{YYY} may be MmtRNA^{Pyl}_{UGA}. The 1R26PylRS may be 1R26PylRS(CbzK). The AlvtRNA^{ΔNPyl(8)}_{YYY} may be AlvtRNA^{ΔNPyl(8)}_{CGA}. The AfTyrRS may be AfTyrRS(p-I-Phe).

[0484] In other embodiments the orthogonal tRNA synthetase-tRNA pairs are: MmPylRS/MmtRNA^{Pyl}_{YYY}; 1R26PylRS/AlvtRNA^{ΔNPyl(8)}_{YYY}; and MjTyrRS/MjtRNA^{Try}_{CUA}. The MmtRNA^{Pyl}_{YYY} may be MmtRNA^{Pyl}_{UGA}. The 1R26PylRS may be 1R26PylRS(CbzK). The AlvtRNA^{ΔNPyl(8)}_{YYY} may be AlvtRNA^{ΔNPyl(8)}_{CGA}. The MjTyrRS may be MjTyrRS(3-Nitro-Tyr) or MjTyrRS(p-Az-Phe).

[0485] The inventors have discovered that, unless specific steps are taken, the methods of producing prokaryotic cell may result in growth defects. To overcome these growth defects the inventors make use of methods of mutagenesis and selection. In a particular embodiment, such method steps are performed before the method steps for producing a prokaryotic cell disclosed herein. It is surprising that such methods may be applied in the present context. The inventors initially assumed that the growth defect may be due to a limiting amount of serV, but further experiments revealed this not to be the case (Fredens et al., 2019). As such, it was unclear whether the growth defect was surmountable. In addition, the inventors assumed that random mutagenesis and selection might reverse some of the recoding of the genome and could also potentially have resulted in read-through of the blank codons. However, as demonstrated by the experiments disclosed herein, the inventors were able to reverse the growth defects without a loss of desired functionality.

[0486] Thus, in an embodiment, prior to the steps of the method for producing a prokaryotic cell, the method comprises: inducing mutagenesis in a cell culture comprising any prokaryotic cell that comprises a recoded genome disclosed herein; maintaining the cell culture under exponential growth conditions; selecting a prokaryotic cell from said cell culture with an increased growth rate compared to the initial culture; wherein the steps of the method for producing a prokaryotic cell are applied to the selected prokaryotic cell.

[0487] The mutagenesis, mutation, and selection steps may be part of a parallel mutagenesis and dynamic parallel selection process, as disclosed herein. The parallel mutagenesis and dynamic parallel selection process may be as disclosed in Schmied et al. (W. H. Schmied et al., Controlling orthogonal ribosome subunit interactions enables evolution of new function. Nature 564, 444-448 (2018); herein incorporated by reference).

[0488] In an embodiment, the induction of mutagenesis comprises the use of a mutagenesis plasmid.

[0489] In particular embodiments, the induction of mutagenesis comprises the use of the mutagenesis plasmid “MP6”. MP6 is described in Badran et al. (A. H. Badran, D. R. Liu, Development of potent in vivo mutagenesis plasmids with broad mutational spectra. Nature Communications 6, 8425 (2015); herein incorporated by reference). MP6 may be according to SEQ ID NO: 59.

[0490] In some embodiments, the mutagenesis may be carried out for 5, 10, 15, 17, 20, 30, 45, 60, 70, 80, 100, 150, 200, or more generations. In particular embodiments, the mutagenesis may be carried out for approximately 1-200, 5-100, 10-25, 15-20, or 17 generations.

[0491] In some embodiments, after mutagenesis, the mutator cultures may be maintained at continuous growth. For instance, the mutator cultures may be transferred to multiple vessels (such as the wells of a 96 well plate). The OD₆₀₀ of the culture may be measured after transfer and then periodically again every 2-9 h, depending on the growth rate. When the OD₆₀₀ reaches a threshold of 0.5 for at least 3 mutator cultures, all cultures may be diluted (for instance, 1/400) into fresh vessels. If no cultures reach the threshold, the three highest OD₆₀₀ values may be used to estimate the next OD₆₀₀ measurement time point, i.e. the time required to reach the threshold. If fewer than 3 cultures reach the threshold after three consecutive OD₆₀₀ measurements, the cultures may be incubated for another 12 h before a dilution step regardless of the measured cell density. Overall, this process flexibly adjusts the selective pressure in an effort to keep the fastest growing cultures in exponential growth.

[0492] In some embodiments, the cell culture may be maintained under exponential growth conditions for 5, 10, 15, 20, 30, 40, 50, 52, 60, 70, 80, 100, 200, or more generations. In particular embodiments, the cell culture may be maintained under exponential growth conditions for approximately 20-80, 30-70, 40-60, or 50 generations. In an exemplified embodiment, the number of generations is 52.

[0493] Multiple rounds of mutagenesis, maintenance, and selection may be applied to the cell cultures. For instance, one, two, three, four, five, ten or more rounds may be applied. In particular embodiments, two rounds are applied. In an embodiment, each round includes the induction of mutagenesis for approximately 10-25 (e.g. 17) generations, and maintenance under exponential growth conditions for approximately 20-80 (e.g. 50) generations.

[0494] The mutagenesis, mutation, and selection steps may be applied to Syn61, Syn61(ev1), or Syn61(ev2). As such, the methods may be applied to a cell that comprises a genome which is at least 80%, 85%, 90%, 95%, 98%, 99%, 99.5%, 99.8%, 99.9%, or 100% identical to any one of: the sequence provided in GenBank accession number CP040347.1, SEQ ID NO: 3, or SEQ ID NO: 4.

[0495] The inventors have further discovered that, unless specific steps are taken, the removal of a first endogenous tRNA, a second endogenous tRNA, and/or a first endogenous release factor may result in growth defects. To overcome these growth defects the inventors make use of methods of mutagenesis and selection. In a particular embodiment, such method steps are performed after the method steps for producing a prokaryotic cell disclosed herein. As for the steps prior to the removal of the endogenous genes, it was assumed that random mutagenesis and selection might reverse some of the desired technical features of the prokaryotic cells, for instance leading to read-through of the blank codons. However, again, the inventors surprisingly found that the growth defects could be remedied without a loss of desired functionality.

[0496] Thus, in an embodiment, after the steps of the method for producing a prokaryotic cell, the method further comprises: obtaining a cell culture from the prokaryotic cell; inducing mutagenesis in the cell culture; maintaining the cell culture under exponential growth conditions; and selecting a prokaryotic cell from said cell culture with an increased growth rate compared to the initial culture.

[0497] The mutagenesis, mutation, and selection steps may be part of a parallel mutagenesis and dynamic parallel selection process, as disclosed herein. The parallel mutagenesis and dynamic parallel selection process may be as disclosed in Schmied et al. (W. H. Schmied et al., Controlling orthogonal ribosome subunit interactions enables evolution of new function. Nature 564, 444-448 (2018); herein incorporated by reference).

[0498] The inventors have discovered that the mutagenesis plasmid MP6 is not functional in cells lacking endogenous tRNAs. To circumvent this problem the inventors have designed a new plasmid, referred to as “recoded MP6”. This plasmid may be according to SEQ ID NO: 67.

[0499] In other embodiments, the mutagenesis plasmid may be a known plasmid, wherein the plasmid has been recoded to remove the first type of sense codon, the second type of sense code, and/or the first type of stop codon, and to replace said codons with synonymous codons. For instance, the mutagenesis plasmid might contain only five, four, three, two, one, or no occurrences of the first type of sense codon, second type of sense codon, or first type of stop codon. In a particular embodiment, the mutagenesis plasmid does not contain any occurrences of the first or second type of sense codon nor any occurrences of the first type of stop codon.

[0500] As such, there is provided herein the use of a recoded MP6 or a recoded mutagenesis plasmid for inducing mutagenesis in a recoded prokaryotic cell. Such use may form part of the methods for producing a prokaryotic cell of the invention, as disclosed herein.

[0501] In some embodiments, the mutagenesis may be carried out for 5, 10, 15, 17, 20, 30, 45, 60, 70, 80, 100, 150, 200, or more generations. In particular embodiments, the mutagenesis is carried out for at least 20, 25, 30, 35, or 40 generations. In particular embodiments, the mutagenesis may be carried out for approximately 1-200, 5-100, 10-90, or 25-75 generations. In particular examples, the mutagenesis may be carried out for at least or about 45, 60, 70 generations.

[0502] In some embodiments, after mutagenesis, the mutator cultures may be maintained at continuous growth. This process may be the same as discussed in relation to steps to be performed prior to the removal of the endogenous tRNAs and release factor.

[0503] In some embodiments, the cell culture may be maintained under exponential growth conditions for 5, 10, 15, 20, 30, 40, 50, 52, 60, 70, 80, 100, 200 or more generations. In particular embodiments, the cell culture may be maintained under exponential growth conditions for approximately 20-80, 30-70, 40-60, or 50 generations. In an exemplified embodiment, the number of generations is 52.

[0504] Multiple rounds of mutagenesis, maintenance, and selection may be applied to the cell cultures. For instance, one, two, three, four, five, ten or more rounds may be applied. In particular embodiments, three rounds are applied. In an embodiment, each round includes the induction of mutagenesis for at least 20 generations, and maintenance under exponential growth conditions for approximately 20-80 (e.g. 50) generations. In a particular embodiment, the first round may include approximately 70 generations, the second round may include 45 generations, and the third round may include 60 generations of mutagenesis.

[0505] At any stage during the methods for producing a prokaryotic cell of invention, the method may comprise a phenotyping assay. The phenotyping assay comprises the analysis of whether the first type of sense codon, second type of sense codon, and first type of stop codon remain recoded. The assay may comprise transforming the prokaryotic cell with a reporter plasmid comprising a recoded codon linked to a reporter, such as GFP (suitable reporters are discussed in the Examples). An orthogonal aaRS/tRNA pair, capable of decoding the recoded codon to incorporate a ncAA, is also inserted. The assay may then comprise the incubation of the cells in the presence or absence of the ncAA substrate to determine if there is reporter signal that is dependent on the ncAA. Further details are provided in the Examples.

[0506] As noted above, the inventors have surprisingly discovered that the methods of mutagenesis and selection may be applied to prokaryotic cells with recoded genomes without affecting the recoding.

[0507] Thus, in an aspect of the invention, there is provided a method for improving the growth rate of a prokaryotic cell wherein the genome has been recoded, wherein the method comprises
[0508] inducing mutagenesis in a cell culture comprising the prokaryotic cell that comprises the recoded genome,
[0509] maintaining the cell culture under exponential growth conditions,
[0510] selecting a prokaryotic cell, from said cell culture, with an increased growth rate compared to the initial culture.

[0511] The prokaryotic cell may comprise a genome wherein a first type of sense codon has been recoded. The recoding of a first type of sense codon may be any sense codon, including any recoded type of sense codon as disclosed herein. The prokaryotic cell may comprise a genome wherein a first and a second type of sense codon has been recoded. The recoding of a first and second types of sense codon may be any two sense codons, including any recoded type of sense codon as disclosed herein.

[0512] The methods of inducing mutagenesis, maintaining the cells, and selecting the cell may be any as disclosed herein.

### Methods for Recoding a Genome

[0513] The following methods enable the skilled person to recode genomes to replace sense or stop codons with synonymous codons. Further information is available in: i) K. Wang et al., Defining synonymous codon compression schemes by genome recoding. Nature 539, 59-64 (2016); ii) J. Fredens et al., Total synthesis of Escherichia coli with a recoded genome. Nature 569, 514-518 (2019); iii) WO2018/020248, and iv) WO2020/229592 (each of which is incorporated herein by reference).

[0514] In an example, preferably one or more rounds of recombination-mediated genetic engineering are used to edit 10-1000 kb, 50-1000 kb, 100-1000 kb, or 100-500 kb of a parent genome to provide two or more different partially synthetic genomes. Thus, in preferred examples each round of recombination-mediated genetic engineering inserts or replaces 10 kb or more, 50 kb or more, 100 kb or more, or about 100 kb of DNA in the parent genome.

[0515] As used herein, the term “recombination-mediated genetic engineering” (also known as “recombineering”) is a method for genetic engineering (i.e. editing genomes) based on homologous recombination systems. Typically recombineering is based on homologous recombination in Escherichia coli mediated by bacteriophage proteins, either RecE/RecT from Rac prophage or Redαβδ from bacteriophage lambda. Any suitable method of recombination-mediated genetic engineering may be used. Methods for recombination-mediated genetic engineering will be well known to those of skill in the art.

[0516] In “classical recombination” (exemplified by lambda red mediated recombination in E. coli), short regions of synthetic DNA may be inserted into the genome or used to replace genomic DNA in a two-step process: i) transformation of cells with linear double stranded DNA (dsDNA) carrying a stretch of synthetic DNA, coupled with a positive selection marker, and flanked by a homology region (HR) to the target region of the genome on each end, and ii) recombination mediated by the homologous regions, followed by selection for genomic integration by virtue of the positive selection marker. This approach can be used to insert or replace 2-3 kb of genomic DNA. Thus, if classical recombination is used, many rounds of recombination-mediated genetic engineering would be required to edit 100-500 kb of the parent genome.

[0517] Thus, in preferred examples the one or more rounds of recombination-mediated genetic engineering comprise one or more rounds of replicon excision for enhanced genome engineering through programmed recombination (REXER).

[0518] REXER is described in WO 2018/020248. Each round of REXER may be used to insert or replace about 50 kb to 250 kb, or about 100 kb of DNA in the parent genome.

[0519] Thus, the one or more rounds of recombination-mediated genetic engineering may comprise:
[0520] i) providing a host cell (e.g. E. coli), wherein the host cell comprises an episomal replicon (e.g. a plasmid or a bacterial artificial chromosome) and a target nucleic acid (e.g. the genome), wherein the episomal replicon comprises a donor nucleic acid sequence (i.e. a synthetic region), wherein the donor nucleic acid sequence comprises in order: 5′-homologous recombination sequence 1-sequence of interest-homologous recombination sequence 2-3′, wherein the sequence of interest comprises a positive selectable marker, and wherein the target nucleic acid comprises in order: 5′-homologous recombination sequence 1-negative selectable marker-homologous recombination sequence 2-3′;
[0521] ii) providing helper protein(s) capable of supporting nucleic acid recombination in said host cell (e.g. lambda Red proteins);
[0522] iii) providing helper protein(s) and/or RNAs capable of supporting nucleic acid excision in said host cell (e.g. CRISPR/Cas9 proteins/RNAs);
[0523] iv) inducing excision of said donor nucleic acid sequence;
[0524] v) incubating to allow recombination between the excised donor nucleic acid and said target nucleic acid; and
[0525] vi) selecting for recombinants having incorporated said donor nucleic acid into said target nucleic acid.

[0526] Suitably selecting for recombinants having incorporated said donor nucleic acid into said target nucleic acid comprises selection for gain of the positive selectable marker of the donor nucleic acid and loss of the negative selectable marker of the target nucleic acid. Suitably selection for gain of the positive selectable marker of the donor nucleic acid and loss of the negative selectable marker of the target nucleic acid is carried out simultaneously. Suitably said sequence of interest comprises both a positive selectable marker and a negative selectable marker. Suitably the negative selectable marker is selected from the group consisting of sacB (sucrose sensitivity), rpsL (S12 ribosomal protein-streptomycin sensitivity), or phe^{ST2511A_A294G} (4-chlorophenylalanine sensitivity). Suitably the positive selectable marker is selected from the group consisting of Cm^{R}(chloramphenicol resistance), Kan^{R} (kanamycin resistance), Hyg^{R} (hygromycin resistance), Gentamycin^{R} (gentamycin resistance), or tetracycline^{R} (tetracycline resistance). Suitably the step of selecting for recombinants comprises sequential selection for said positive and negative markers, or sequential selection for said negative and positive markers. Suitably the step of selecting for recombinants comprises simultaneous selection for said positive and negative markers.

[0527] Suitably said method as described above further comprises the step of inducing at least one double stranded break in the target nucleic acid sequence, wherein said double stranded break is between said homologous recombination sequence 1 and said homologous recombination sequence 2. Suitably at least two double stranded breaks are induced in the target nucleic acid sequence, wherein each said double stranded break is between said homologous recombination sequence 1 and said homologous recombination sequence 2.

[0528] Suitably said excised donor nucleic acid begins with said homologous recombination sequence 1 and ends with said homologous recombination sequence 2.

[0529] Suitably said episomal replicon comprises a negative selectable marker independent of the donor nucleic acid sequence. Suitably said method comprises the further step of selecting for loss of the episomal replicon by selecting for loss of said negative selectable marker independent of the donor nucleic acid sequence. Suitably said episomal replicon comprises in order: excision cut site 1-donor nucleic acid sequence-excision cut site 2. Suitably said target nucleic acid possesses its own origin of replication capable of functioning within said host cell. Suitably said episomal replicon is a plasmid nucleic acid. Suitably said episomal replicon is a bacterial artificial chromosome (BAC). Suitably said target nucleic acid is the host cell genome.

[0530] The episomal replicon (e.g. BAC) may be assembled by homologous recombination, for example in S. cerevisiae, as described in Kouprina, N., et al., 2004. Methods Mol Biol 255, 69-89. The assembly may combine: 7-14 stretches of synthetic DNA, each 6-13 kb in length; a selection construct (comprising a negative selection marker and/or a positive selection marker); and a BAC shuttle vector backbone. The stretches of synthetic DNA may collectively correspond to the donor nucleic acid sequence (i.e. the synthetic region) in the episomal replicon, wherein each stretch comprises 80-200 bp of overlapping DNA sequence with each other, and wherein the overlap regions are free of any recoding targets. The stretches may be supplied in pSC101 or pST vectors flanked by suitable restriction sites (e.g. BsaI, AvrII, SpeI, or XbaI). Thus, during assembly the synthetic DNA stretches may be excised by digestion with the corresponding restriction enzymes. Assembly of the episomal replicon may be verified by sequencing.

[0531] Suitably the two homology regions may be 30-100 bp, or 40-50 bp, or about 50 bp in length.

[0532] CRISPR/Cas9 machinery may be used to for excision. In some examples the CRISPR/Cas9 machinery comprises Cas9, tracrRNA and two spacer RNAs, wherein the spacer RNAs target the two homology regions for excision. In preferred embodiments, the spacer RNAs are linear double stranded spacers. In other embodiments, the CRISPR/Cas9 machinery comprises Cas9 and two sgRNAs, wherein the sgRNAs target the two homology regions for excision.

[0533] Lambda red recombination machinery may be used for recombination. The lambda red recombination machinery may comprise lambda alpha/beta/gamma.

[0534] The method may comprise performing one or more rounds of REXER, i.e. the steps as described above with a first donor nucleic acid sequence, choosing further donor sequence(s) contiguous with said first donor nucleic acid sequence, and repeating said steps with said further donor nucleic acid sequence(s) until the partially synthetic genome has been assembled. This is known as genome stepwise interchange synthesis (GENESIS), described in Wang, K. et al., 2016. Nature 539, 59-64 and is shown schematically in FIG. 4 of WO2020/229592.

[0535] In preferred examples the donor sequence(s) correspond to regions of the synthetic genome.

[0536] Thus, the donor sequence(s) (i.e. synthetic region) may comprise 20 or fewer occurrences of one or more sense codons; and/or the donor sequence(s) may comprise 10 or more, 20 or more, or 100 or more genes with no occurrences of one or more sense codons.

[0537] The donor sequence(s) (i.e. synthetic region) may be identical to sequences (i.e. non-synthetic regions) of the parent genome except that they have 50 or fewer, 20 or fewer, 10 or fewer, 5 or fewer, or 0 occurrences of each of one or more sense codons; and/or comprise less than 10%, 5%, 2%, 1%, 0.5%, 0.1% of the occurrences of each of one or more sense codons, relative to the corresponding region in the parent genome; and/or comprise 10 or more, 20 or more, or 100 or more genes with no occurrences of one or more sense codons.

[0538] The donor sequence(s) (i.e. synthetic region) may also be refactored relative to the sequences (i.e. non-synthetic regions) of the parent genome. For 3′,3′ overlaps (i.e. pairs of genes in opposite orientations) a synthetic insert may be inserted between the genes. For 3′,3′ overlaps the synthetic insert may comprise the overlapping region. For 5′, 3′ overlaps (i.e. pairs of genes in the same orientation) a synthetic insert may be inserted between the genes. For 5′, 3′ overlaps the synthetic insert may comprise: (i) a stop codon; (ii) about 20-200 bp, or 20-100 bp, or 20-50 bp, from upstream of the overlapping region; and (iii) the overlapping region. Preferably, the synthetic insert comprises: (i) a stop codon; (ii) about 20 bp from upstream of the overlapping region; and (iii) the overlapping region. In preferred embodiments the stop codon is in frame with the original start site for the downstream gene. Preferably the stop codon is TAA.

[0539] Preferably the donor sequence(s) (i.e. synthetic region) are collectively 50-10000 kb, 100-5000 kb, 100-2000 kb, 100-1000 kb, or 100-500 kb in size. Preferably each donor sequence is 50-300 kb, 100-200 kb, or about 100 kb in size.

[0540] Accordingly, the donor sequences may each be about 100 kb in size and identical to corresponding sequences of the parent genome, except they comprise no occurrences of one or more sense codons and all pairs of genes which share an overlapping region comprising the one or more sense codons in the parent genome are refactored, wherein the pairs of genes are those in which sense codon replacements would change the encoded protein sequence of both or either of the pair of genes.

[0541] In preferred examples the viability of the genome is tested after each round of recombination-mediated genetic engineering. In some examples the sequence of the genome is verified after each round of recombination-mediated genetic engineering.

[0542] In some embodiments the genome is a reduced synthetic genome or a minimal synthetic genome. A “reduced genome” is one in which the size of the parent genome has been reduced by removing non-essential genes and/or non-coding regions. A “minimal genome” is a genome which has been reduced to its minimal size whilst remaining viable e.g. by deletion of all non-essential regions of the genome.

### Refactoring

[0543] Genomes contain numerous overlapping open reading frames (ORFs), which can be classified as 3′, 3′ (between ORFs in opposite orientations) or 5′, 3′ (between ORFs in the same orientation). The sense codons to be replaced may be found within both classes of overlap in the parent genome.

[0544] If the replacement of the sense codons of each ORF within an overlap can be achieved without changing the encoded protein sequence of either ORF (i.e. by introducing synonymous codon(s)) then it may not be necessary to edit (e.g. refactor) the parent genome. However, when the encoded protein sequence is changed by the replacement of the sense codons, (i.e. one or more synonymous sense codons are not introduced into one or both of the ORFs), then it may be necessary to edit (e.g. refactor) the parent genome.

[0545] Thus, in some examples one or more pairs of genes which share an overlapping region comprising the sense codons in the parent genome are refactored. “Refactored” means that the genes are reorganised to prevent changes to the encoded protein sequences. Preferably, the pairs of genes are those in which sense codon replacements (e.g. defined synonymous codon replacements) would change the encoded protein sequence of both or either of the pair of genes. Most preferably, all pairs of genes which share an overlapping region comprising the sense codons in the parent genome are refactored, wherein the pairs of genes are those in which sense codon replacements (e.g. defined synonymous codon replacements) would change the encoded protein sequence of both or either of the pair of genes.

[0546] For 3′,3′ overlaps (i.e. pairs of genes in opposite orientations) a synthetic insert may be inserted between the genes. For 3′,3′ overlaps the synthetic insert may comprise the overlapping region.

[0547] For 5′, 3′ overlaps (i.e. pairs of genes in the same orientation, comprising an upstream gene and a downstream gene) a synthetic insert may be inserted between the genes. For 5′,3′ overlaps the synthetic insert may comprise: (i) a stop codon; (ii) about 20-200 bp, or 20-100 bp, or 20-50 bp, from upstream of the overlapping region; and (iii) the overlapping region.

[0548] Preferably, the synthetic insert comprises: (i) a stop codon; (ii) about 20 bp from upstream of the overlapping region; and (iii) the overlapping region. This preserves the sequence of the RBS for the downstream ORF and the distance between this RBS and its start codon. In preferred embodiments the stop codon is in frame with the original start site for the downstream gene. Preferably the stop codon is TAA.

### General

[0549] In all instances, where a “prokaryotic cell” described, the invention also extends to a cell culture containing a plurality of the prokaryotic cells. Similarly, where a “bacterium” is described, the invention also extends to a bacterial culture containing a plurality of the bacteria.

[0550] Sequence comparisons can be conducted with the aid of readily available sequence comparison programs. These publicly and commercially available computer programs can calculate sequence identity between two or more sequences.

[0551] The skilled technician will appreciate how to calculate the percentage identity between two nucleic sequences. In order to calculate the percentage identity between two nucleic sequences, an alignment of the two sequences must first be prepared, followed by calculation of the sequence identity value. The percentage identity for two sequences may take different values depending on: (i) the method used to align the sequences, for example, the Needleman-Wunsch algorithm (e.g. as applied by Needle(EMBOSS) or Stretcher(EMBOSS), the Smith-Waterman algorithm (e.g. as applied by Water(EMBOSS)), or the LALIGN application (e.g. as applied by Matcher(EMBOSS); and (ii) the parameters used by the alignment method, for example, local versus global alignment, the matrix used, and the parameters applied to gaps.

[0552] Having made the alignment, there are many different ways of calculating percentage identity between the two sequences. For example, one may divide the number of identities by: (i) the length of shortest sequence; (ii) the length of alignment; (iii) the mean length of sequence; (iv) the number of non-gap positions; or (iv) the number of equivalenced positions excluding overhangs. Furthermore, it will be appreciated that percentage identity is also strongly length-dependent. Therefore, the shorter a pair of sequences is, the higher the sequence identity one may expect to occur by chance.

[0553] A calculation of percentage identities between two nucleic acid sequences may then be calculated from such an alignment as (N/T)*100, where N is the number of positions at which the sequences share an identical residue, and T is the total number of positions compared including gaps but excluding overhangs.

[0554] The sequence alignment may be a pairwise sequence alignment. Suitable services include Needle (EMBOSS), Stretcher (EMBOSS), Water (EMBOSS), Matcher (EMBOSS), LALIGN, or GeneWise. In an example, the identity between two nucleic sequences may be calculated using the service Needle(EMBOSS) set to the default parameters, e.g. matrix (BLOSUM62), gap open (10), gap extend (0.5), end gap penalty (false), end gap open (10), and end gap extend (0.5). In another example, the identity between two nucleic acid sequences may be calculated using the service Matcher (EMBOSS) set to the default parameters, e.g. matrix (BLOSUM62), gap open (1), gap extend (1).

[0555] All of the features described herein (including any accompanying claims, abstract and drawings), and/or all of the steps of any method or process so disclosed, may be combined with any of the above aspects in any combination, except combinations where at least some of such features and/or steps are mutually exclusive.

[0556] For a better understanding of the invention, and to show how embodiments of the same may be carried into effect, reference will now be made to the Examples, which are not intended to limit the invention in any way.

### EXAMPLES

[0557] It is widely hypothesised that removing cellular tRNAs—making their cognate codons unreadable—might create a genetic firewall to viral infection and enable sense codon reassignment. However, it has been impossible to test these hypotheses because no such bacteria have been created. Here—following synonymous codon compression and laboratory evolution in Escherichia coli—the inventors delete the tRNAs and release factor-1, which normally decode two sense codons and a stop codon; the resulting cells cannot read the canonical genetic code and are completely resistant to a cocktail of viruses. The inventors reassign these codons to enable the efficient synthesis of proteins containing three distinct non-canonical amino acids. Importantly, the inventors demonstrate the facile reprogramming of the cells for the encoded translation of diverse non-canonical heteropolymers and macrocycles.

### Example 1—Creating Syn61Δ3

[0558] The inventors predicted that replacing the annotated TCA, TCG and TAG codons in the genome of a bacteria cell would enable deletion of serT and serU (encoding tRNA^{Ser}_{UGA} and tRNA^{Ser}_{CGA}) and prfA (encoding RF-1), which decode these codons, in a single strain (FIG. 1A). The inventors have previously showed that serT, serU and prfA could be deleted in separate strains derived from Syn61 (18); however, this does not capture the potential epistasis between these genes. As such, the experiments disclosed herein asked whether serT, serU and prfA could be deleted in a single strain derived from Syn61.

[0559] Syn61 grows 1.6-fold slower than the strain from which it was derived (18). To increase the growth rate of the strain prior to serT, serU and prfA deletion, a previously described random parallel mutagenesis and automated dynamic parallel selection strategy was applied (19); this approach uses feedback control to dynamically dilute mutated cultures on the basis of growth rate, and thereby selects fast growing strains from within mutated populations (Fig. S1A). Through two consecutive rounds of mutagenesis and selection a strain was created, Syn61(ev2), which grew 1.3-fold faster (FIG. 1B, Figs. S1B, C, D, and E, and Data files S1 and S2).

[0560] Next, serU, serT and prfA were removed from Syn61(ev2) to create Syn61Δ3 (FIG. 1A, Fig. S1C, and Data files S1 and S2). This demonstrated that removing the target codons in Syn61 was sufficient to enable the deletion of all decoders of the target codons in the same strain. However, Syn61Δ3 grew 1.7-fold slower than Syn61(ev2) (FIG. 1B). This growth decrease may result from the presence of target codons in the genome of Syn61 that were not annotated and targeted (20, 21), and may also result from the other non-canonical roles that tRNAs may play (22, 23).

[0561] Three sequential rounds of random parallel mutagenesis and automated dynamic parallel selection were performed in order to evolve Syn61Δ3 to Syn61Δ3(ev5), which grew 1.6-fold faster than Syn61Δ3 (FIGS. 1A and B, Figs. S1B, C, F, G, and H, and Data file S1). When grown in LB media in shake flasks the doubling time of Syn61Δ3(ev5) was 38.72+/−1.02 min (Fig. S1I). Syn61Δ3(ev5) contains 482 additional mutations—420 substitutions and 62 indels—of which 72 are in intergenic regions, with respect to Syn61 (Data files S1 and S3, Fig. S2). No target codons were reverted, further demonstrating the stability of our recoding scheme. 16 sense codons in non-essential genes were converted to target codons (5×TCG, 3×TCA, 8×TAG); these frequencies are comparable to those observed for other codons (Data file S1). Subsequent experiments used Syn61Δ3 or (once available) its evolved derivatives to investigate the new properties of these strains.

### Materials and Methods for Example 1

### Gene Recoding

[0562] For genes and plasmids used in this work it was necessary to compress the genetic code. The genetic code of protein CDSs was compressed using the recoding rules implemented in the design of Syn61 (TCG to AGC, TCA to AGT, TAG to TAA) using a custom Python script (18)—see Data file S2 for sequence details.

### Construction of Recoded Helper and MP6 Plasmid

[0563] All cloning procedures from this section were performed in E. coli DH10b or MDS42, both strains containing an rpsLK43R mutation for resistance to streptomycin. The helper plasmid used throughout this study for all lambda-red-mediated recombination experiments is a recoded version of the ‘helper’ plasmid pKW20_CDFtet_pAraRedCas9_tracrRNA described in ref (18), which is referred to herein as ‘recoded helper’; see Data file S2 for sequence details.

[0564] To construct the recoded helper plasmid the sequence was first divided into five sections with 20-25 bp overlaps: i) section 1 encoding araC, pBAD promoter and lambda-red gamma, ii) section 2 encoding lambda-red beta and alpha followed by a unique BsaI site, iii) section 3 encoding Cas9 flanked by BsaI sites, iv) section 4 encoding an apraR selection marker, and v) section 5 encoding the pCDF origin, a tracrRNA cassette and an ampicillin promoter.

[0565] Sections 1-3 were synthesized by Genewiz, section 4 was synthesized as a gBlock (IDT) and section 5 was amplified by PCR from the original helper plasmid (18).

[0566] To assemble the recoded helper plasmid, firstly sections 4 and 5 were combined by overlap-extension PCR. The product was then assembled together with sections 1 and 2 into an intermediate plasmid by HiFi Assembly (NEB). The intermediate plasmid was transformed into E. coli MDS42 and its sequence verified by next generation sequencing (NGS). Finally, the intermediate plasmid was digested with BsaI, and assembled together with section 3 by HiFi Assembly to generate the recoded helper plasmid. The plasmid sequence was verified by NGS.

[0567] The inventors designed a recoded version of MP6 mutagenesis plasmid (31) for Syn61 strain evolution. The recoded sequence was divided into four overlapping sections, so as to minimise expression of the mutagenic components during cloning: i) section 1 encoding araC and the pBAD promoter, ii) section 2 encoding most of dnaQ926 followed by an AvrII site, PmCDA1, and cat for chloramphenicol resistance, iii) section 3 encoding the N-terminus of dnaQ926 followed by dam, seqA, emrR, and ugi and iv) section 4 containing the pCDF origin. Sections 1-3 were synthesised by Genewiz and Twist Bioscience, while section 4 was amplified by PCR from the original MP6 plasmid (31). Section 4 was combined with sections 1 and 2 by HiFi Assembly (NEB), generating an intermediate plasmid, and the overlaps between sections were verified by Sanger sequencing. Finally, the intermediate plasmid was digested with AvrII and assembled together with section 3 by HiFi Assembly to generate recoded MP6. The plasmid sequence was verified by NGS (see Data file S2 for sequence details).

### Automated Parallel Evolution and Strain Isolation

[0568] Two rounds of parallel mutagenesis and automated dynamic parallel selection were applied to Syn61 and later three rounds to Syn61Δ3. For mutagenesis, Syn61 was transformed with the mutagenesis plasmid MP6 (31) (or recoded MP6 for Syn61Δ3 and derivative evolutions) and the cells grown on LB agar containing 2% glucose and 20 μg/mL chloramphenicol. 96 individual colonies were picked into wells containing 200 μL of LB medium supplemented with 2% glucose and 20 μg/mL chloramphenicol and the colonies were grown overnight at 37° C., 220 rpm. The dense overnight cultures were diluted 1/400 into fresh LB medium supplemented with 20 μg/mL chloramphenicol and grown to OD₆₀₀˜0.1. Mutagenesis was induced by addition of L-arabinose to a final concentration of 0.5%, creating independent mutator cultures in each well. The mutator cultures were grown for 24 h at 37° C., 220 rpm. Following a 1/400 dilution step into fresh induction medium (LB with 20 μg/ml chloramphenicol and 0.5% L-arabinose), the cultures were grown for another 24 h at 37° C., 220 rpm. This equates to a growth phase of approximately 17 generations with induced mutagenesis (2×log₂(400)). In later rounds of evolution, the induction of mutagenesis was extended to up to 70 generations. Mutagenesis was induced for ˜17 generations in round 1 and 2 of Syn61 evolution. During Syn61Δ3 evolution mutagenesis was induced for ˜70 generations in round 1, ˜45 generations in round 2 and ˜60 generations in round 3.

[0569] Following mutagenesis, the mutator cultures were diluted 1/2 into a fresh 96-well plate with 200 μl LB medium supplemented with 2% glucose to suppress mutagenesis. The plate was transferred onto a robotics platform (Beckman Coulter Biomek FXp accessing Thermofisher Cytomat 2C incubator shaker and Molecular Devices SpectraMax 13 plate reader) for continuous growth (37° C., 400 rpm) and automated dynamic parallel selection for the fastest growing clones (scripts available at https://github.com/JWChin-Lab). The OD₆₀₀ was measured in each well at the start and then periodically again every 2-9 h, depending on the growth rate. When the OD₆₀₀ reached a threshold of 0.5 for at least 3 mutator wells, all cultures were diluted 1/400 into a fresh plate with 200 μl LB supplemented with 2% glucose. If no wells had reached the threshold, the three highest OD₆₀₀ values across the plate were used to estimate the next OD₆₀₀ measurement time point, i.e. the time required to reach the threshold. If fewer than 3 wells reached the threshold after three consecutive OD₆₀₀ measurements, the plate was incubated for another 12 h before a dilution step was implemented regardless of the measured cell density. Overall, this process flexibly adjusts the selective pressure in an effort to keep the fastest growing wells in exponential growth. After 6 dilution steps (equivalent to an estimated growth for 52 generations) the workflow was terminated and the growth rate was determined for all evolved mutator wells in the final plate as described below. The wells of evolved populations with the lowest doubling times were streaked out on LB agar plates with 2% glucose and 200 μg/ml streptomycin and incubated overnight at 37° C. to obtain single colonies. 4-12 individual evolved colonies were picked from each streaked population and growth rates measured for individual clones in direct comparison with the progenitor strain before evolution. The fastest growing clones were prepared for next-generation sequencing and further analysis as described below.

[0570] After one round of Syn61 evolution, cells from ten independent wells of the 96 well plate were streaked to obtain single colonies. 80 clones were picked from these streaks and their doubling time screened. 20 out of 80 screened clones isolated initially emerged with a reduced doubling time in single replicate experiments. However, only 4 of these clones showed improved growth in subsequent measurements that were performed in replicate. Two of these four clones (C02.5 and C02.6) are derived from a single well and the other two clones are both derived from a distinct single well (C04.4 and C04.7). All four clones were sequenced (see Data file S1 for a complete list of all accumulated mutations). One of these clones (C04.4) was carried forward and re-named Syn61(ev1).

[0571] After evolution of Syn61(ev1), cells from twelve independent wells of the 96 well plate were streaked to obtain single colonies. 88 clones were picked from these streaks and their doubling time screened. 18 out of 88 screened clones isolated initially emerged with a reduced doubling time in single replicate experiments. However, only 3 of these clones showed improved growth in subsequent measurements that were performed in replicate. Two of these clones (A1 1.2 and A1 1.3) are derived from a single well, and the third clone (E10.4) was from a distinct well. All three clones were sequenced (see Data file S1 for a complete list of all accumulated mutations). One of these clones (A1 1.2) was carried forward and re-named Syn61(ev2). Syn61(ev2) was used to generate Syn61Δ3.

[0572] Syn61Δ3 was evolved in two 96 well plates. Cells from 42 independent wells were steaked and a total of 184 clones were picked from these streaked cells and their doubling time screening (88 of the clones were from 22 wells in plate 1 and 96 clones were from 20 wells from plate 2). 130 out of the 184 clones stood out initially with reduced doubling time compared to Syn61Δ3. 22 of the fastest growing clones were characterised in (mostly) replicate growth experiments. These clones were derived from 11 independent wells (Plate 2: F11.2, F11.3, F11.5, F11.6, F11.7, F11.8, F11.9, F11.10 (all from well F11), E10.1, E5.1, F5.2, F8.1, F8.2, G5.2, A11.1; Plate 1: A7.4, D8.2, D8.4, A9.1, G8.1, D1.2, D11.1). The following clones were sequenced and selected for further sequencing analysis (see Data file S1 for a complete list of all accumulated mutations): A7.4, F11.9, E5.1, D8.2. One of these clones (F11.9) was carried forward and renamed Syn61Δ3 (ev3).

[0573] 96 independent wells of Syn61Δ3 (ev3) were evolved. 19 wells with the lowest overall doubling time were streaked and 90 clones were isolated from 18 wells since one well did not survive the streak. 37 clones emerged with a reduced doubling time in single replicate measurements. 22 clones with the fastest growth were selected for replicate measurements and 8 clones from 5 distinct wells were identified to have improved growth compared to the progenitor: E7.4, E7.2 (from well E7); E10.3, E10.4 (from well E10); D5.3, D5.1 (from well D5); D8.1, B9.1. Four clones were sequenced and selected for further sequencing analysis: E7.4, E7.2, E10.4, D5.3 and D8.1 (Data file S1). One clone with the most improved growth (E7.4) was selected for the next round of evolution and renamed it Syn61Δ3 (ev4).

[0574] Syn61Δ3(ev4) was evolved in one 96-well plate (plate 1), with an adapted selection programme (with the maximum time for growth before the next dilution set to 6.5 h instead of 12 h) after the experiment did not yield any well with improved doubling time with the initial programme (12 h maximum time for growth before the next dilution). Also performed was a consecutive round of selection without intermediate mutagenesis on plate 1 and the resulting set of evolved pools are referred to as plate 2. Overall, fewer wells survived the adapted dynamic selection. 13 wells were streaked from plate 1 and 7 wells were streaked from plate 2 and a total of 152 clones were screened in single replicate measurements (96 from plate 1 and 56 from plate 2). 43 clones showed initial improved growth but only 5 clones remained with reproducibly faster growth in replicate measurements compared to the non-evolved progenitor, all from distinct wells: Plate 1: B12.3, D5.3, G12.6, E7.3; Plate 2: E8.4. One clone was selected as the most evolved Syn61 derivative used in this study (B12.3) and it was renamed Syn61Δ3 (ev5).

Deletion of prfA, serU and serT by Lambda-Red Recombination to Generate Syn61Δ3

[0575] A scarless deletion of serU, serT and prfA in Syn61(ev2) was performed, with each deletion proceeding through two sequential lambda-red mediated recombinations. In the first recombination a double selection marker cassette was provided to the recipient cell to replace the target gene. A repair template was provided in a second recombination to remove the double-selection marker and replace it with the native environment of the targeted locus, where only the sequence corresponding to the target gene was missing.

[0576] A recoded version of the rpsL-kan^{R} selection marker cassette (18) was used for all deletions. The recoded rpsL-kan^{R} was amplified with oligos containing ˜50 bp homology to the flanking genomic sequences of serU, serT and prfA. The repair templates for serU, serT and prfA were constructed through overlap extension PCR; the 500-600 bp regions directly upstream and downstream of the target gene were amplified from a Syn61 genomic DNA template with oligos designed to overlap by ˜40 bp. These two fragments were then combined into one PCR product by overlap extension PCR, and used it as a repair template. All oligonucleotide sequences are provided in Data file S2.

[0577] For the first recombination, Syn61(ev2) cells were transformed with the recoded helper plasmid. Single colonies were inoculated into 2×YT medium with 50 μg/ml apramycin and grown overnight at 37° C., shaking at 220 rpm. The overnight culture was diluted in 500 mL of 2×YT medium with 50 μg/ml apramycin to OD₆₀₀=0.05 and the cells grown at 37° C. with shaking until OD₆₀₀ 0.2. To induce lambda-red expression, L-arabinose powder was added to the culture to a final concentration of 0.5% w/v and incubated the culture for one additional hour at 37° C. with shaking. The cells were harvested at OD₆₀₀≈0.6, and the cells were made electrocompetent as described previously (32). 100 μL of electrocompetent cells were electroporated with ˜4 μg of rpsL-kan^{R} PCR product with homology to the serU locus, recovered for 1 hour in 4 mL SOB and then transferred to 100 mL 2×YT supplemented with 50 μg/ml apramycin. After 4 hours the cells were spun down and resuspended in 500 μL H₂O and plated in serial dilutions on 2×YT agar plates supplemented with 2% glucose, 50 μg/ml apramycin and 50 μg/ml kanamycin. The plates were incubated overnight at 37° C., and subsequently individual colonies were picked. These colonies were restreaked onto 2×YT agar plates supplemented with 2% glucose, 50 μg/ml apramycin and 50 μg/ml kanamycin. After overnight incubation at 37° C., the intended deletions were verified by colony PCR with primers flanking the locus of interest. This process was then repeated in the resulting strain, Syn61(ev2)ΔserU∴rpsL-kan^{R}, providing the serU repair template and counter-selecting on 2×YT agar plates supplemented with 2% glucose, 50 μg/ml apramycin and 200 μg/ml streptomycin. Removal of the rpsL-kan^{R} cassette was verified by colony PCR and Sanger sequencing. Sequential deletion of serT and prfA through an analogous 2-step process resulted in the creation of Syn61Δ3.

### Growth Rate Measurement and Analysis

[0578] Bacterial clones were grown overnight at 37° C. in LB supplemented with 200 μg/mL streptomycin. Overnight cultures were diluted 1:200 into 200 μL fresh medium in a 96-well plate. Growth was monitored on an Infinite 200 Pro plate reader (Tecan AG, Switzerland) at 37° C. with high speed linear shaking. Measurements of OD₆₀₀ were taken every 5 min for 18 h. To determine doubling times, the growth curves were log₂-transformed and the first derivative was determined (d(log₂(x))/dt) for all consecutive time-points. The inventors used the mean over ten consecutive time-points with the maximal log₂-derivative to calculate the doubling time (1/mean(max log₂-derivative)). Growth rates were calculated as the slope of a linear fit to the ten consecutive time-points with the maximal log₂-derivatives (as determined above). Curve fitting (linear regression) was performed on replicates simultaneously using Prism7 (Graphpad). Error bars show ±standard error of the fit.

[0579] To determine growth under standard laboratory conditions overnight cultures of Syn61Δ3(ev5) were diluted 1:100 into 80 ml fresh medium in a 250 ml conical flask. Three replicate cultures were incubated at 37° C. with shaking (220 rpm) and OD₆₀₀ measurements were taken every 10-30 min, every 10 min during exponential phase. For each independent culture the inventors log₂-transformed the growth curves and selected a 60 min window with the fastest growth during exponential phase. The growth rate (slope) and doubling time (1/slope) were calculated from a linear fit to log₂-derivatives of six consecutive time-points within the window. Curve fitting (linear regression) was performed for each replicate with Prism7 (Graphpad) and the average doubling time and growth rate was calculated. Error bars show ±standard error of the mean.

### Preparation of Whole-Genome Libraries for Next-Generation Sequencing

[0580] Colonies were picked from the clones of interest and used to inoculate 5 mL of LB supplemented with 200 μg/mL streptomycin, and incubated at 37° C. overnight with shaking at 220 rpm. Genomic DNA was extracted from these cultures with the DNEasy Blood and Tissue Kit (QIAgen), as per manufacturer's instructions. From purified genomic DNA, paired-end sequencing libraries were prepared with the Nextera XT DNA Library Preparation Kit (Illumina) by hand or with a Biomek FXp (Beckman Coulter, scripts available at https://github.com/JWChin-Lab), following the manufacturer's protocol but with reduced volumes: input gDNA (0.2 ng/μL, 1 μL), TD Buffer (2 μL), ATM (1 μL), NT Buffer (1 μL), indeces (1 μL), NPM (3 μL). Index sequences were generated from the ‘Illumina Adapter Sequences’ support document (Nextera DNA indexes, pg 16, dated June 2020), purchased from Biomers and used at 10 μM Libraries were then purified with AMPure XP magnetic beads (Beckman Coulter) as per manufacturer's instructions (6:10 bead:reaction vol. ratio). Libraries were quantified by Qubit (Thermofisher) and subsequently pooled, denatured and paired-end sequenced on a MiSeq (Illumina) according to manufacturer's instructions using v3 MiSeq reagent kits of either 600 cycles (2×300 cycles) or 150 cycles (2×75 cycles).

### Analysis of Syn61 Knockout and Evolved Strains

[0581] To analyse the genome sequences of the Syn61 derivatives generated in this work the inventors used breseq, a software package that aligns next generation sequencing reads (generated as above) to a reference genome and identifies mutations, deletions and insertions (33). The program was used to analyse isolated clones after each round of evolution or targeted gene knockout (serT, serU, prfA), to identify the mutations that arose during the generation of these strains (Data file S1 contains a list of all intermediate strains and mutations). Additionally, a previously described workflow (32) (script available at https://github.com/TiongSun/iSeq) was used to align reads to a reference Syn61 genome sequence and visualised read alignments in the Integrative Genomics Viewer (34). Further, the inventors identified ORFs with more than one mutation (Fig. S2). Since clones derived from the same evolved pool were found to be nearly identical in their sequence the inventors selected only one clone per pool for the analysis, one with the most overall mutations. The inventors compared all mutations in ORFs accumulated during evolution before the deletion of serT, serU and prfA separately from mutations gained in the evolution of Syn61Δ3 due to alteration of the genetic background upon removal of the decoding elements. Under the assumption that mutations are independent events the inventors calculated the probability for at least two mutations arising by chance in one ORF by

$$\\ p = 1 - \frac{a !}{{a}^{b} ( a - b ) !} ,$$

where a is the total number of ORFs (a=3556 in Syn61) and b is the average number of mutations accumulated in ORFs after one round of evolution.

### Example 2—tRNA Deletion Ablates Virus Production in Syn61Δ3

[0582] The inventors investigated the effects of deleting the genes encoding tRNA^{Ser}_{CGA} and tRNA^{Ser}_{UGA} and RF-1 on phage propagation by Syn61Δ3 (FIG. 2A), in a modified one-step growth experiment (24).

[0583] For Syn61(ev2) the total titer of phage T6 (a representative of the lytic, T-even family (FIG. 2B)) briefly dropped (as phage infect cells) before rising to 2-logs₁₀ above the input titer, as infected cells produced new phage particles (FIG. 2C, Fig. S3A). As expected, the OD₆₀₀ of Syn61(ev2) was decreased by infection with T6 phage, which is lytic (FIG. 2D). Syn61ΔRF-1 (Data file S1) and Syn61(ev2) produced a comparable level of phage on a comparable timescale, and showed similar changes in OD₆₀₀ upon infection. The inventors conclude that deletion of RF-1 alone has little, if any, effect on T6 phage production or cell lysis.

[0584] Infection of Syn61Δ3 with T6 phage led to a steady decrease in total phage titer. Importantly, this decrease was comparable to that observed when protein synthesis—and therefore phage production in cells—was completely inhibited by addition of gentamicin (FIG. 2C, Fig. S3B). Moreover, T6 infection had a minimal effect on the growth of Syn61Δ3 (FIG. 2D). The inventors conclude that Syn61Δ3 does not produce new phage particles upon infection with T6 phage and that T6 phage does not lyse these cells. Similar results were obtained with T7 phage, which has 57 TCG codons, 114 TCA codons and 6 TAG codons in its 40 kb genome (Fig. S3A, C and D). The inventors treated cells with a cocktail of phage containing lambda, P1vir, T4, T6 and T7, which have TCA or TCG sense codons 10- to 58-times more abundant than the amber stop codon in their genomes (FIG. 2E, Fig. S3E), and found that the treatment with this phage cocktail led to lysis of Syn61(ev2) and Syn61ΔRF-1, but had little effect on the growth of Syn61Δ3 (FIGS. 2, F and G), suggesting that the deletion of tRNAs in Syn61Δ3 provides resistance to a broad range of phage.

### Materials and Methods for Example 2

### General Phage Methods

[0585] Phage λ, P1vir, T4, and T6 were provided by George Salmond (University of Cambridge, Department of Biochemistry). Phage T7 was obtained from ATCC (BAA-1025-B2). The titer of each phage stock was estimated by serially diluting stocks in phage buffer (1 mM MgSO4, 1 mM Tris-HCl, 0.1% gelatine), then infecting E. coli MG1655 in top agar (LB agar with 0.35% agar), and allowing plaques to mature at 37° C. overnight. The plaques were counted and the PFU/mL was calculated for each stock.

### Total Titer of Infecting Phage

[0586] Overnight cultures of E. coli Syn61 variants were diluted to OD₆₀₀=0.5 in 2×YT, and then transferred 3 mL to 50 mL Falcon tubes and infected them with phage T6 or T7 (MOI=5·10⁻² and 5·10⁻⁵, respectively). For each phage a cell-free control was included, where phage was added to 3 mL 2×YT. The infected cultures were incubated at 37° C. for 4 hours, shaking at 220 rpm. At relevant timepoints 100 μL of sample was transferred from each culture to a microcentrifuge tube on ice, containing 400 μL phage buffer and 50 μL chloroform. Samples were immediately vortexed thoroughly, centrifuged at 13000×g for 4 min, transferred to a LoBind microcentrifuge tube (Eppendorf) and stored at 4° C. To quantify phage titer, each sample was serially diluted in phage buffer. 10 μL of the relevant dilution was used to infect a 200 μL overnight culture of E. coli MG1655 grown in 2×YT. Infected cells were mixed with 4 mL molten top-agar and poured onto a TYE agar plate. After drying, plates were incubated at 37° C. overnight for bacterial lawns to grow and phage plaques to develop. The number of plaques were counted and multiplied by the dilution in order to calculate the phage titer of the original sample.

[0587] As a background control, E. coli Syn61 was rendered metabolically inactive: the inventors diluted an overnight culture to OD₆₀₀=1 in 10 mL 2×YT, added gentamycin to a final concentration of 1000 μg/mL, and incubated the cells at 37° C. for 6 hours, shaking at 220 rpm. The cells were centrifuged at 4000×g for 10 mins and then the supernatant, which contained the antibiotic, was aspirated. The inactive cells were resuspended in 2×YT to OD₆₀₀=0.5 and infected them with phage as above. The inventors assessed the metabolic activity of the gentamycin-treated cells by 35S incorporation into newly synthesized proteins. 1 mL of gentamycin-treated E. coli Syn61 culture (OD₆₀₀=0.5) was incubated for 1 hour at 37° C. in the presence of 1.5 μL 35S labelled mixture of methionine and cysteine (11 mCi/mL, 1175 Ci/mmol, Perkin Elmer NEG072).

[0588] The inventors measured the OD₆₀₀ at the end of the incubation, spun down the cells at 4000×g for 10 min washed the cells with cold PBS. Based on the OD₆₀₀ measurement above, the cells were resuspended in 1× BugBuster Protein Extraction Reagent (Merck) to a density of 1.4×10⁹ cells/mL (assuming that OD₆₀₀ of 1.0=1×10⁹ cells/mL with 1 cm pathlength). Cells were lysed for 1 hour and the equivalent of 2.8×10⁷ cells were loaded on each lane of a 4-12% Bis-tris polyacrylamide gel. The inventors then analysed the lysates by SDS-PAGE, following by staining with Quick Coomassie Stain (Neo Biotech) as per manufacturer's instructions. The resulting gels were dried and exposed to a storage phosphor screen (GE Healthcare Life Sciences) for 2 weeks, followed by imaging on an Amersham Typhoon (GE Healthcare Life Sciences).

### Phage Infection Assays

[0589] For simultaneous infection by multiple phage, the inventors prepared cultures of Syn61 variants as above and added a cocktail of all five phage (λ, P1vir, T4, T6, and T7, MOI=1·10⁻² for each phage). Cell growth and lysis was monitored by measuring OD₆₀₀ after 4 hours and comparing to uninfected cultures.

### Phage Genome TCG, TCA, TAG Codon Counting

[0590] The inventors identified the number and location of the TCG, TCA and TAG codons in the genome of different phage using a custom Python 3.7 script. Briefly, the script opens a GenBank file containing the annotated genome of the phage of interest using Biopython (35), then scans coding sequences to identify target codons and their location, and stores them in memory. The Python library matplotlib (36) is then used to generate a plot of the genome where the location of each target codon is represented with a vertical line. The script is available at https://github.com/JWChin-Lab.

### Example 3—ncAA Incorporation

[0591] Reassigning Target Codons for ncAA Incorporation

[0592] The inventors expressed Ub_{11XXX} genes (ubiquitin-His₆ bearing TCG, TCA or TAG at position 11), and genes encoding the cognate orthogonal MmPylRS/MmtRNA^{Pyl}_{YYY} pair (25) (in which the anticodon is complementary to the codon at position 11 in the Ub gene) in Syn61Δ3(ev5) (FIG. 3A, Data file S2).

[0593] In the absence of added ncAA, little to no ubiquitin was detected from Ub genes bearing a target codon at position 11, while control experiments demonstrated that ubiquitin is produced from a ‘wildtype’ gene that does not contain any target codons (FIG. 3B). Thus, none of the target codons are read by the endogenous translational machinery in Syn61Δ3. This further demonstrates that all of the target codons are orthogonal in this strain.

[0594] Upon addition of a ncAA substrate for the MmPylRS/MmtRNA^{Pyl} pair (N^{ε}-((tert-butoxy)carbonyl)-L-lysine (BocK)) (25), ubiquitin was produced at levels comparable to wildtype controls (FIG. 3B, Data file S4). ESI-MS and MS/MS demonstrated the genetically directed incorporation of BocK at position 11 of Ub in response to each target codon using the complementary MmPylRS/MmtRNA^{Pyl}_{YYY} pair (FIG. 3C, Fig. S4A). Additional experiments demonstrated efficient incorporation of ncAAs in response to sense and stop codons in GST-MBP (Fig. S5, Data file S4). The inventors demonstrated good yields of Ub-His₆ incorporating 2, 3, or 4 ncAAs into a single polypeptide in response to each of the target codons (Data file S4, FIG. 3, D to I, and Fig. S4, B to G), and further demonstrated the incorporation of 9 ncAAs in response to 9 TCG codons in a single repeat protein (Fig. S6). Together, these results demonstrated that the sense codons TCG and TCA, and the stop codon TAG, can be efficiently reassigned to ncAAs in Syn61Δ3 derivatives.

Encoding Distinct ncAAs in Response to Distinct Target Codons

[0595] Next, the inventors assigned TCG, TCA and TAG codons to distinct ncAAs in Syn61Δ3(ev4) using engineered mutually orthogonal aaRS/tRNA pairs that recognize distinct ncAAs and decode distinct codons (FIG. 4A, Fig. S7). The inventors incorporated two distinct ncAAs into ubiquitin in response to TCG and TAG codons (FIG. 4B, Fig. S8A to B), and demonstrated the incorporation of two distinct ncAAs at four sites in ubiquitin, with each ncAA incorporated at two different sites in the protein (FIGS. 4B and C, and Fig. S8C to E, and Data file S4). The inventors incorporated three distinct ncAAs into ubiquitin, in response to TCG, TCA and TAG codons (FIG. 4D, E, and Fig. S8F). The inventors demonstrated the generality of their approach by synthesizing seven distinct versions of ubiquitin, each of which incorporated three distinct ncAAs (Fig. S9, Fig. S10, Data file S4)

### Encoded Non-Canonical Polymers and Macrocycles

[0596] For a linear polymer composed of two distinct monomers (A and B) there are four elementary polymerization steps (A+B->AB, B+A->BA, A+A->AA, B+B->BB) from which any sequence can be composed (FIG. 5A). For ribosome-mediated polymerization these four elementary steps correspond to each monomer acting as an A-site or P-site substrate to form a bond with another copy of the same monomer or with a distinct monomer (FIG. 5A). The inventors encoded each elementary step by inserting TCG-TCG (encoding AA; monomer A was arbitrarily assigned to the TCG codon in this nomenclature), TAG-TAG (encoding BB; monomer B was assigned to the TAG codon), TCG-TAG (encoding AB) and TAG-TCG (encoding BA) at codon 3 of a sfGFP gene. The inventors demonstrated the elementary steps for three pairs of monomers: A=BocK, B=p-IPhe; A=CbzK, B=p-I-Phe; A=NE-allyloxycarbonyl-L-lysine (AllocK), B=CbzK (FIG. 5B, Fig. S11). The inventors genetically encoded six entirely non-natural tetrameric sequences and a hexameric sequence for each pair of monomers, as well as an octameric sequence for the AllocK, CbzK pair (22 synthetic polymer sequences in total) (Fig. S11, FIGS. 5, C, D, and E, Fig. S12). All encoded polymerizations were ncAA dependent (Fig. S11, FIGS. 5, C, D and E, Fig. S12B) and ESI-MS confirmed that the inventors had synthesized the non-canonical hexamers and octamers as sfGFP fusions (FIG. 5F, Fig. S12C). The inventors encoded tetramer and hexamer sequences composed of AllocK and CbzK between SUMO and GyrA-CBD and purified the free polymers (FIGS. 5, G, H, and I, Fig. S13). Finally, the inventors encoded the synthesis of a non-natural macrocycle reminiscent of the products of non-ribosomal peptide synthetases (FIGS. 5, G and J).

TABLE 1
(“Data file S4”) - Expression Yields

| | | | | Fraction | | |
|---|---|---|---|---|---|---|
| | | | | Full- | Yield | % of |
| Reporter | aaRS/tRNA | ncAA | Cells | length | (mg/L) | WT |
| Wildtype | MmPylRS/ | (—) | Syn61Δ3 | | 9.7 | 100.0 |
| Ubiquitin | MmtRNAPyl(CGA) | | (ev5) | | | |
| Wildtype | MmPylRS/ | (—) | MDS42 | | 10.4 | 107.2 |
| Ubiquitin | MmtRNAPyl(CGA) | | | | | |
| Single Ub- | MmPylRS/ | Bock | Syn61Δ3 | | 10.8 | 111.7 |
| 11TCG | MmtRNAPyl(CGA) | (5 mM) | (ev5) | | | |
| Single Ub- | MmPylRS/ | Bock | Syn61Δ3 | | 8.6 | 88.4 |
| 11TCA | MmtRNAPyl(UGA) | (5 mM) | (ev5) | | | |
| Single Ub- | MmPylRS/ | Bock | Syn61Δ3 | | 8.3 | 85.9 |
| 11TAG | MmtRNAPyl(CUA) | (5 mM) | (ev5) | | | |
| Double Ub- | MmPylRS/ | Bock | Syn61Δ3 | | 14.1 | 145.5 |
| 11TCG/65TCG | MmtRNAPyl(CGA) | (5 mM) | (ev5) | | | |
| Double Ub- | MmPylRS/ | Bock | Syn61Δ3 | | 8.3 | 85.8 |
| 11TCA/65TCA | MmtRNAPyl(UGA) | (5 mM) | (ev5) | | | |
| Double Ub- | MmPylRS/ | Bock | Syn61Δ3 | | 9.0 | 92.9 |
| 11TAG/65TAG | MmtRNAPyl(CUA) | (5 mM) | (ev5) | | | |
| Triple Ub- | MmPylRS/ | Bock | Syn61Δ3 | | 10.6 | 109.1 |
| 11TCG/14TCG/ | MmtRNAPyl(CGA) | (5 mM) | (ev5) | | | |
| 65TCG | | | | | | |
| Triple Ub- | MmPylRS/ | Bock | Syn61Δ3 | | 5.8 | 59.5 |
| 11TCA/14TCA/ | MmtRNAPyl(UGA) | (5 mM) | (ev5) | | | |
| 65TCA | | | | | | |
| Triple Ub- | MmPylRS/ | Bock | Syn61Δ3 | | 1.5 | 15.1 |
| 11TAG/14TAG/ | MmtRNAPyl(CUA) | (5 mM) | (ev5) | | | |
| 65TAG | | | | | | |
| Quadruple Ub- | MmPylRS/ | Bock | Syn61Δ3 | | 2.6 | 27.1 |
| 9TCG/11TCG/ | MmtRNAPyl(CGA) | (5 mM) | (ev5) | | | |
| 14TCG/65TCG | | | | | | |
| Quadruple Ub- | MmPylRS/ | Bock | Syn61Δ3 | | 2.1 | 21.8 |
| 9TCA/11TCA/ | MmtRNAPyl(UGA) | (5 mM) | (ev5) | | | |
| 14TCA/65TCA | | | | | | |
| Quadruple Ub- | MmPylRS/ | Bock | Syn61Δ3 | | 2.8 | 28.9 |
| 9TAG/11TAG/ | MmtRNAPyl(CUA) | (5 mM) | (ev5) | | | |
| 14TAG/65TAG | | | | | | |
| | | | | | | 0.0 |
| Double Ub- | | CbzK | Syn61Δ3 | | 7.4 | 76.7 |
| 11TCG/65TAG | | (2 mM)/ | (ev5) | | | |
| | | p-I-Phe | | | | |
| | | (2 mM) | | | | |
| Double-Double | | CbzK | Syn61Δ3 | | 1.6 | 16.7 |
| Ub- 11TCG/ | | (2 mM)/ | (ev5) | | | |
| 14TCG/57TAG/ | | p-I-Phe | | | | |
| 65TAG | | (2 mM) | | | | |
| Wildtype | 1R26PylRS/ | CbzK | Syn61Δ3 | | 7.7 | 79.5 |
| Ubiquitin | AlvtRNAΔNPyl | (2 mM)/ | (ev5) | | | |
| | (8)(CGA); AfTyrRS(p-I- | p-I-Phe | | | | |
| | Phe)/AftRNATyr | (2 mM)/ | | | | |
| | (A01)(CUA); MmPylRS/ | Bock | | | | |
| | MmtRNAPyl(UGA) | (5 mM) | | | | |
| Triple Ub-9TAG/ | 1R26PylRS/ | CbzK | Syn61Δ3 | | 2.8 | 28.7 |
| 11TCG/14TCA | AlvtRNAΔNPyl | (2 mM)/ | (ev5) | | | |
| | (8)(CGA); AfTyrRS(p-I- | p-I-Phe | | | | |
| | Phe)/AftRNATyr | (2 mM)/ | | | | |
| | (A01)(CUA); MmPylRS/ | Bock | | | | |
| | MmtRNAPyl(UGA) | (5 mM) | | | | |
| Triple Ub-9TAG/ | 1R26PylRS/ | CbzK | Syn61Δ3 | | 3.1 | 31.7 |
| 11TCG/14TCA | AlvtRNAΔNPyl | (2 mM)/ | (ev5) | | | |
| | (8)(CGA); AfTyrRS(p-I- | p-I-Phe | | | | |
| | Phe)/AftRNATyr | (2 mM)/ | | | | |
| | (A01)(CUA); MmPylRS/ | Allock | | | | |
| | MmtRNAPyl(UGA) | (5 mM) | | | | |
| Triple Ub-9TAG/ | 1R26PylRS/ | CbzK | Syn61Δ3 | | 3.5 | 35.9 |
| 11TCG/14TCA | AlVARNAΔNPyl | (2 mM)/ | (ev5) | | | |
| | (8)(CGA); AfTyrRS(p-I- | p-I-Phe | | | | |
| | Phe)/AftRNATyr | (2 mM)/ | | | | |
| | (A01)(CUA); MmPylRS/ | CypK | | | | |
| | MmtRNAPyl(UGA) | (5 mM) | | | | |
| Triple Ub- | 1R26PylRS/ | CbzK | Syn61Δ3 | | 5.9 | 60.8 |
| 9TAG/11TCG/ | AlvtRNAΔNPyl | (2 mM)/ | (ev5) | | | |
| 14TCA | (8)(CGA); AfTyrRS(p-I- | p-I-Phe | | | | |
| | Phe)/AftRNATyr | (2 mM)/ | | | | |
| | (A01)(CUA); MmPylRS/ | AlkK | | | | |
| | MmtRNAPyl(UGA) | (5 mM) | | | | |
| Triple Ub-9TAG/ | MmPylRS/ | Allock | Syn61Δ3 | | 3.0 | 31.0 |
| 11TCG/14TCA | MmtRNAPyl(UGA); | (2 mM)/ | (ev5) | | | |
| | MjTyrRS(p-Az-Phe)/ | CbzK | | | | |
| | MjtRNATyr(CUA); | (2 mM)/ | | | | |
| | 1R26PylRS/ | p-Az-Phe | | | | |
| | AlvtRNAΔNPyl | (2 mM) | | | | |
| | (8)(UGA) | | | | | |
| Triple Ub-9TAG/ | MmPylRS/ | AlkK | Syn61Δ3 | | 0.9 | 9.1 |
| 11TCG/14TCA | MmtRNAPyl(UGA); | (2 mM)/ | (ev5) | | | |
| | MjTyrRS(p-Az-Phe)/ | CbzK | | | | |
| | MjtRNATyr(CUA); | (2 mM)/ | | | | |
| | 1R26PylRS/ | p-Az-Phe | | | | |
| | AlvtRNAΔNPyl | (2 mM) | | | | |
| | (8)(UGA) | | | | | |
| Triple Ub-9TAG/ | MmPylRS/ | Allock | Syn61Δ3 | | 3.8 | 38.7 |
| 11TCG/14TCA | MmtRNAPyl(UGA); | (2 mM)/ | (ev5) | | | |
| | MjTyrRS(3-Nitro-Tyr)/ | CbzK | | | | |
| | MjtRNATyr(CUA); | (2 mM)/ | | | | |
| | 1R26PylRS/ | 3-Nitro-Tyr | | | | |
| | AlvtRNAΔNPyl | (2 mM) | | | | |
| | (8)(UGA) | | | | | |
| Wildtype GST- | MmPylRS/ | (—) | Syn61Δ3 | 0.92 | 23.1 | 100.1 |
| MBP | MmtRNAPyl(CGA) | | (ev5) | | | |
| GST-TCG-MBP | MmPylRS/ | Bock | Syn61Δ3 | 0.86 | 21.6 | 93.7 |
| | MmtRNAPyl(CGA) | (5 mM) | (ev5) | | | |
| GST-TAG-MBP | MmPylRS/ | Bock | Syn61Δ3 | 0.82 | 17.6 | 76.3 |
| | MmtRNAPyl(CUA) | (5 mM) | (ev5) | | | |
| Wildtype GST- | MmPylRS/ | (—) | MDS42 | 0.96 | 24.8 | 107.4 |
| MBP | MmtRNAPyl(CGA) | | | | | |
| GST-TCG-MBP | MmPylRS/ | (—) | MDS42 | 0.93 | 21.3 | 92.0 |
| | MmtRNAPyl(CGA) | | | | | |
| GST-TAG-MBP | MmPylRS/ | Bock | MDS42 | 0.44 | 6.1 | 26.4 |
| | MmtRNAPyl(CUA) | (5 mM) | | | | |
| SUMO- | MmPylRS/ | (—) | Syn61Δ3 | | 68.8 | 100.0 |
| GSGSGSGS- | MmtRNAPyl(CGA); | | (ev5) | | | |
| GyrA- CBD | 1R26PylRS/ | | | | | |
| | AlvtRNAΔNPyl | | | | | |
| | (8)(CUA) | | | | | |
| SUMO-TCG/ | MmPylRS/ | Allock | Syn61Δ3 | | 38.8 | 56.4 |
| TAG/TCG/TAG- | MmtRNAPyl(CGA); | (2 mM)/ | (ev5) | | | |
| GyrA- CBD | 1R26PylRS/ | CbzK | | | | |
| | AlvtRNAΔNPyl | (2 mM) | | | | |
| | (8)(CUA) | | | | | |
| SUMO-TCG/ | MmPylRS/ | Allock | Syn61Δ3 | | 13.6 | 19.8 |
| TAG/TCG/ | MmtRNAPyl(CGA); | (2 mM)/ | (ev5) | | | |
| TAG/TCG/ | 1R26PylRS/ | CbzK | | | | |
| TAG- GyrA- | AlvtRNAΔNPyl | (2 mM) | | | | |
| CBD | (8)(CUA) | | | | | |
| SUMO- | MmPylRS/ | (—) | Syn61Δ3 | | 40.4 | 100.0 |
| CGSGSGSGS - | MmtRNAPyl(CGA); | | (ev5) | | | |
| GyrA-CBD | 1R26PylRS/ | | | | | |
| | AlvtRNAΔNPyl | | | | | |
| | (8)(CUA) | | | | | |
| SUMO-C-TCG/ | MmPylRS/ | Allock | Syn61Δ3 | | 29.2 | 72.3 |
| TAG/TCG/ | MmtRNAPyl(CGA); | (2 mM)/ | (ev5) | | | |
| TAG-GyrA- CBD | 1R26PylRS/ | CbzK | | | | |
| | AlvtRNAΔNPyl | (2 mM) | | | | |
| | (8)(CUA) | | | | | |

### Materials and Methods for Example 3

### Construction of Vectors for Expressing Ubiquitin and GFP

[0597] All cloning was conducted in E. coli DH10b. The plasmids for expressing ubiquitin (Ub) or sfGFP were constructed based upon a pBAD expression system (37). Recoded wild-type ubiquitin, sfGFP, apra^{R}, and araC were ordered as gBlocks (IDT). The plasmids were then constructed through a 4-piece assembly with HiFi DNA Assembly Mix (NEB), where the overlapping fragments were i) either recoded wild-type Ub or sfGFP, ii) recoded apra^{R}, iii) recoded araC, and iv) the pBAD vector origin region, amplified by PCR. This generated plasmids pBAD_Ub-wt_rec and pBAD_sfGFP-wt_rec. Variants of these plasmids where TCG, TCA or TAG codons were introduced into the Ub or sfGFP genes were generated by site-directed mutagenesis of pBAD_Ub-wt_rec and pBAD_sfGFP-wt_rec. See Data file S2 for sequence details of all plasmids.

Construction of aaRS/tRNA Plasmids for Decoding TCG, TCA, or TAG Codons

[0598] All cloning was conducted in E. coli DH10b. For incorporating one type of ncAA, the inventors used a pMB1-based plasmid encoding the aaRS/tRNA pair that directs ncAA incorporation. For tRNA^{Pyl} constructs with anticodons CGA and UGA, the inventors designed pylT tRNA genes (including pylTopt mutations from ref (38)) such that the entire anticodon stem loop (ASL—the anticodon plus 6 nucleotides on either side) was replaced by the ASL sequence of serU (in the case of CGA) or serT (in the case of UGA) E. coli genes.

[0599] pMB1-based aaRS/tRNA plasmids were constructed by HiFi Assembly of multiple fragments, including i) a recoded aaRS under control of the constitutive glnS promoter, synthesized as a gBlock (IDT), ii) a tRNA gene placed in between an lpp promoter and an rrnC terminator, synthesized as a gBlock (IDT), iii) a recoded kan^{R} gene, and iv) a pNMB1 vector origin amplified by PCR from a previously described pMB1-based plasmid (37). With this strategy the plasmids pMB1_MmPylRS_tRNA-Pyl-opt(CGA/UGA/CUA) were assembled. All plasmid sequences are available via their Genbank accessions listed in Data file S2.

Design and Construction of Plasmids Encoding aaRS/tRNA Pairs for Double or Triple ncAA Incorporations

[0600] For double and triple distinct ncAA incorporation experiments, the inventors designed plasmids polycistronically encoding two aaRS/tRNA pairs (16). The inventors placed the two aaRS CDSs downstream of a glnS promoter; the intergenic region between the aaRS genes was optimized with an RBS calculator program (https://salislab.net/software/). Both tRNA genes were placed downstream of a lpp promoter. The intergenic regions between tRNA genes were based upon the intergenic regions between the alaX and alaW genes in the E. coli genome.

[0601] To construct the plasmids encoding two aaRS/tRNA pairs, the inventors ordered recoded aaRS genes preceded by their corresponding RBS sequences as individual gBlocks (IDT). The polycistronic tRNAs, along with the lpp promoter, rrnC terminator and intergenic region, were ordered as a single gBlock (IDT). The inventors assembled synthetic DNA fragments encoding aaRS genes and tRNAs together with a pMB1 backbone containing kan^{R} (described above) by HiFi Assembly (NEB). This way the inventors generated plasmids pMB1_1R26PylRS(CbzK)_AfTyrRS(p-I-Phe)_AlvtRNA-ΔNPyl(8)(CGA)_AftRNA-Tyr(A01)(CUA), pMB1_MmPylRS_1R26PylRS(CbzK)_MmtRNAPyl-opt(CGA)_AlvtRNA-ΔNPyl(8)(CUA), pMB1_MmPylRS_AfTyrRS(p-I-Phe)_MmtRNA-Pylopt(CGA)-AftRNA-Tyr(A01)(CUA) and pMB1_MmPylRS_IR26PylRS(CbzK)_MmtRNA-Pylopt(CGA)_AlvtRNA-ΔNPyl(8)(UGA). Plasmid sequences are available via their Genbank accessions listed in Data file S2.

[0602] For incorporating three distinct ncAAs, the inventors used pNMB1_MmPylRS_tRNA-Pyl-opt(UGA) as a template to PCR-amplify a DNA fragment encompassing i) MmPylRS under control of a glnS promoter and ii) a pylT-serT(UGA) chimeric tRNA gene (see above) between an lpp promoter and an rrnC terminator. The inventors then used site-directed mutagenesis to separately created an intermediate pBAD_Ub derivative where codon positions 9, 11 and 14 of ubiquitin are substituted with TAG, TCG and TCA respectively. Next, the MmPylRS/pylTserT(UGA) fragment was inserted downstream of the ubiquitin gene in the intermediate plasmid by HiFi Assembly. Finally, site-directed mutagenesis was performed in the resulting plasmid with primers that directed the introduction of ‘opt’ mutations into the sequence of tRNA^{Pyl} as in ref (38), to generate pBAD_Ub9TAG11TCG14TCA-MmPylRS_MmtRNA-Pyl-opt(UGA). The inventors used this plasmid as a starting point to create pBAD_Ub9TAG11TCG14TCA-MjTyrRS(p-Az-Phe)_tRNA-Mj-Tyr(CUA) and pBAD_Ub9TAG11TCG14TCA-MjTyrRS(3-Nitro-TyrRS)_tRNA-Mj-Tyr(CUA), by replacing the aaRS/tRNA pair of the parent plasmid with recoded synthetic DNA fragments of MjTyrRS(p-Az-Phe) or MjTyrRS(3-Nitro-TyrRS), or their corresponding tRNAs, by HiFi assembly. The sequences are detailed in Data file S2.

[0603] Experiments describing the incorporation of BocK and p-I-Phe into sfGFP (FIGS. 5C and F) used derivatives of pBAD_sfGFP_MmPylRS_MmtRNA-Pyl-opt(CGA). Starting from pBAD_Ub9TAG11TCG14TCA-MmPylRS_MmtRNA-Pyl-opt(UGA), the inventors replaced the Ub gene with wild-type sfGFP by HiFi Assembly. The inventors subsequently derivatized position 3 of sfGFP by introducing the different codon combinations by site-directed mutagenesis. Finally, site-directed mutagenesis was used to replace the ASL in each of the resulting plasmids from serT to serU, generating a set of pBAD_sfGFP_MmPylRS_MmtRNA-Pyl-opt(CGA) derivatives (see Data file S2 for the full list of plasmids).

### Western Blot Analyses of Syn61 Expressions of Ubiquitin Containing Target Codons

[0604] For expressing ubiquitin variants, the inventors co-transformed 60 μL of electrocompetent Syn61Δ3, Syn61Δ3(ev3) or Syn61Δ3(ev4) cells with a pMB1_MmPylRS_tRNA-Pyl-opt(YYY) plasmid (with either serU(CGA), serT(UGA) or CUA anticodon, see Data file S2) and the relevant pBAD_Ub plasmid (1 μL per plasmid). Electroporated cells were recovered in 1 mL of prewarmed SOB at 37° C. while shaking at 1000 rpm on a benchtop thermomixer (Eppendorf) for 1 h 30 min. Following recovery, 1 mL of cells were diluted into 6 mL of pre-warmed 2×YT containing 50 μg/mL kanamycin and 50 μg/mL apramycin. The diluted cells were then incubated for 18 h at 37° C. while shaking at 220 rpm. Expression of ubiquitin was initiated by diluting the overnight culture 1:100 into 5-50 mL of pre-warmed 2×YT containing 50 μg/mL kanamycin, 50 μg/mL apramycin, 0.2% L-arabinose (w/v), and either 0 mM or 5 mM (BocK). After 8 hours of expression at 37° C. with shaking at 220 rpm, the cells were harvested by centrifugation (4,000×g 20 min), and the pellet was frozen at −20° C. until further use. For western blot analyses post-expression, the inventors harvested 5×10⁷ cells (assuming that OD₆₀₀ of 1.0=1·10⁹ cells/mL with 1 cm pathlength) by centrifugation (10000×g, 1 min) in a 1.5 mL microcentrifuge tube. The cell pellet was resuspended in 50 μL of 1×LDS sample buffer (BioRad) with 5% β-mercaptoethanol, boiled at 95° C. for 5 min, and then vortexed for 5 min. 10 μL of each sample was loaded into a 4-12% Bis-Tris NuPAGE SDS-PAGE gel (Invitrogen) and electrophoresed for 45 min at 180 V. Transfer to a PVDF membrane was accomplished with an iBlot 2 semi-wet transfer system. The membrane was then blocked for 30 min with 5 mL of Odyssey Blocking Buffer, followed by incubation with 5 mL of anti-His-tag primary antibody (Abcam, cat. no. ab18184) diluted 1:1000 in blocking buffer with 0.2% Tween-20. After 1 hour at room temperature, the membrane was washed three times for 5 min each with 5 mL of PBS containing 0.2% Tween-20. The secondary antibody was added at 1:15000 dilution in a 5 mL volume, diluted into a 50/50 mix of blocking buffer and 0.2% Tween-20, supplemented with 0.01% SDS. The secondary antibody (IRDye 925-68070, LiCor) was incubated for 30 min at room temperature, followed by three washes of 5 min each with 5 mL of PBS containing 0.2% Tween-20. Imaging of western blots was performed on a Typhoon Trio phosphorimager (GE Life Sciences).

### GFP Expression Measurements

[0605] The inventors performed expression of recoded sfGFP genes bearing single or multiple TCG, TCA, or TAG codons in the same media conditions as the expressions from Ubiquitin genes (see section above). Briefly, 50 μL of cells (Syn61Δ3(ev4)) were co-electroporated with both a pMVB1-based aaRS/tRNA plasmid (1 μL) as well as a pBAD_sfGFP reporter plasmid (1 μL). The transformed cells were recovered for 1 h 30 min in 1 mL of SOB while shaking at 1000 rpm at 37° C., and subsequently the entire 1 mL of cells were inoculated into 6 mL of 2×YT containing 50 μg/mL kanamycin and 50 μg/mL apramycin and incubated overnight at 37° C. while shaking at 220 rpm. The inventors performed expressions in 96-well microtiter plate format, inoculating overnight cultures 1:100 into 0.5 mL of 2×YT containing kanamycin (50 μg/mL), apramycin (50 μg/mL), Larabinose (0.2%), and the presence or absence of 2 mM ncAA. The 96-well plates were incubated for 16 hours at 37° C. while shaking at 750 rpm in a Thermo-Shaker (Grant-bio). After centrifugation for 10 min at 3200 g, cell pellets were resuspended in 150 μL of PBS. To measure GFP expression normalized by cell density, 100 μL of resuspended cells was transferred to a Costar clear 96-well flat-bottom plate, and OD₆₀₀ and GFP fluorescence (λₑₓ: 485 nm; λₑₘ: 520 nm) measurements were recorded on a PHERAstar FS plate reader (BMG LABTECH) with the gain set to 200 and the focal adjustment at 3.5 mm.

Purification of His6x-Tagged Reporter Proteins from E. coli

[0606] Cells (Syn61Δ3(ev4) or Syn61Δ3(ev5)) harbouring i) a pMB1-based plasmid carrying aaRS/tRNA pairs and ii) a pBAD_sfGFP or pBAD_Ub derivative were grown overnight at 37° C. with shaking at 220 rpm. Overnight cultures were prepared in 10 mL volumes for reporters containing a single target codon and larger volumes (20-50 mL) for those containing multiple codons. Expression cultures were centrifuged for 10 min at 4000×g, the pellets were chilled on ice and then the cells were resuspended in 1/20th of the original culture volume of lysis buffer (1×PBS, 1× Bugbuster® Protein Extraction Reagent (Novagen®), 50 μg/mL DNase 1, 100 μg/mL lysozyme, 1 mM PMSF, and 20 mM imidazole). The cell resuspensions were incubated for 30 min at 4° C., and the lysates were then clarified by centrifugation (16000×g, 4° C., 30 min). The clarified lysate supernatant was then transferred to fresh microcentrifuge tubes containing 50-100 μL of Ni²⁺-NTA slurry (Qiagen). The Ni²⁺-NTA mixture was incubated for 1 h at 4° C. while tumbling gently. The inventors collected the Ni²⁺-NTA beads gravity filtration on a fritted column and resuspended them in 500 μL of wash buffer (PBS, 40 mM imidazole, pH 8); three washes were performed. To elute polyhistidine-tagged proteins, the inventors subsequently resuspended the washed beads in 100 μL of elution buffer (PBS, 300 mM imidazole, pH 8). Following centrifugation (1000×g, 4° C., 1 min), the supernatant with eluted proteins was transferred into fresh microcentrifuge tubes, and the elution procedure repeated three times. To quantify protein expression yields (mg/L), the inventors used the Qubit™ Protein Assay kit (ThermoScientific) according to the manufacturer's protocol and stored purified proteins at −20° C. prior to subsequent analyses.

Purification of GST-Tagged Reporter Proteins from E. coli

[0607] Cells were prepared in 10 mL volumes in an identical manner as to the His₆-tagged reporter expressions, except the lysates were incubated with 100 μL of Glutathione Sepharaose™ 4B beads (GE Healthcare) according to the manufacturers' protocol. Following 1 h incubation at 4° C. with gentle agitation, the inventors washed the beads three times with 1 mL of PBS. The inventors then eluted GST-tagged proteins bound to the beads with 150 μL of 10 mM reduced glutathione in 50 mM Tris-HCl pH 8.0. Eluted proteins were mixed to a final concentration of 1×LDS sample buffer (BioRad) and 10 μL of each sample was then loaded into a 4-12% Bis-Tris NuPAGE gel. Following electrophoresis, the gel was stained with InstantBlue (Expedeon) for 30 min followed by a rinse with water.

### Construction of Vectors for Expressing His₆-SUMO-ncPeptide-GyrA

[0608] Recoded wild-type GyrA-CBD and His₆-SUMO were ordered as gBlocks (IDT). The plasmids were assembled in a 4-piece assembly with HiFi DNA Assembly Mix (NEB), where the overlapping fragments contained a GS4 linker between SUMO and GyrA. The assembly contained i) PCR amplified GS₄-GyrA-CBD; ii) His₆-SUMO-GS₄; iii) a DNA fragment containing the MmPylRS/MmtRNA^{Pyl}_{CGA}) pair; and iv) the pBAD backbone amplified by PCR from pBAD_Ub-wt_rec. This generated plasmid pBAD_SUMO-GS₄-GyrACBD_MmPylRS_MmtRNA-Pyl-opt(CGA). Variants of this plasmid where the noncanonical peptide encoding sequence and/or a cysteine codon is embedded between SUMO and GyrA, were generated by site-directed mutagenesis. See Data file S2 for sequence details of all plasmids.

### Expression of His6-SUMO-ncPeptide-GyrA-CBD Fusion Protein

[0609] The inventors transformed 60 μL of electrocompetent Syn61Δ3(ev5) cells containing the pMB1_MmPylRS_1R26PylRS(CbzK)_MmtRNA-Pyl-opt(CGA)_AlvtRNA-ΔNPyl(8)(CUA) plasmid with a pBAD_SUMO-XXX-GyrA-CBD_MmPylRS_MmtRNA-Pyl-opt(CGA) or pBAD_SUMO-Cys-XXX-GyrA-CBD_MmPylRS_MmtRNA-Pyl-opt(CGA) derivative (XXX denotes the coding sequence for the target peptide). The electroporated cells were recovered in 1 mL SOB at 37° C. while shaking with 200 rpm, after 2 h the cells were diluted in 20 mL 2×YT containing 50 μg/mL kanamycin and 50 μg/mL apramycin. The expression culture was inoculated by addition of the grown preculture into 500 mL TB medium, maintaining the antibiotic selection. The TB culture was grown at 37° C. while being agitated (200 rpm) to an OD₆₀₀ of 2.5-3.0 (˜12 h). Expression was induced by addition of 0.4% L-arabinose and 2 mM of both ncAAs (AllocK, CbzK) was added. After 14 h the culture was partitioned into 250 mL aliquots and the cells harvested by centrifugation (4000 rpm, 20 min, 4° C.). The cell pellets were washed with PBS and stored at −20° C.

### Purification of His6-SUMO-ncPeptide-GyrA-CBD Fusion Protein and Peptide Excision

[0610] The frozen cell aliquots were thawed and resuspended in ice cold MES buffer (20 mM MES pH 6.9, 150 mM NaCl), supplemented with DNAse (0.01 mg/mL) and Lysozyme (0.1 mg/mL). The resuspended cells were passed through a pneumatic homogenizer twice and the lysate cleared by centrifugation (25000 rpm, 25 min). The supernatant was mixed with 1 mL of Ni²⁺-NTA slurry (50% beads in 20% ethanol) and incubated for 1 h at 4° C. under gentle agitation. Using a Poly-Prep column (BioRad) the Ni²⁺-NTA agarose was separated from the supernatant through gravity filtration. The filtrate was washed with 30 mL of MES buffer supplemented with 30 mM imidazole and the protein subsequently eluted in 2 mL of MES buffer containing 200 mM imidazole. The eluate was concentrated to approximately 10 mg/mL and the buffer exchanged to MES buffer. 4 mg of protein (˜100 μg of peptide) was used in each excision reaction, which were prepared in 500 μL MES buffer containing 10 or 200 mM DTT (cyclisation or DTT induced cleavage) and 0.04 mg Ulp1. The reaction was incubated at 37° C. and the reaction progress was monitored by LC-MS, upon completion (18-48 h) the free peptide was purified either by C18 spin column purification (linear AllocK/CbzK tetramer) or hot, acidic methanol extraction (linear AllocK/CbzK hexamer, cyclic AllocK/CbzK tetramer).

[0611] For C18 spin column (Pierce™) purifications, a protocol was essentially performed as described in the manufacturer's instructions, the only modification being an additional washing step with 70% ACN, 0.1% AcOH to remove proteins and substituting the elution buffer with 90% MeOH, 0.2% AcOH. Briefly, the sample was mixed with 4× sample buffer (20% ACN, 2% AcOH) and loaded in 200 μL portions onto the activated and equilibrated C18 spin column. The reaction was passed twice over the column by centrifugation at 1500×g for 30 s. Then the column was washed twice with 200 μL wash buffer (5% ACN and 0.5% AcOH) and once with 200 μL protein wash buffer (70% ACN, 0.2% AcOH). The peptide was then eluted in 2×20 μL 90% MeOH, 0.2% AcOH, and the methanol was evaporated under an air stream (not to dryness). The sample was then refilled to the initial volume with 0.2% AcOH and analyzed by ESI-MS.

[0612] For hot, acidic methanol extractions, the linear AllocK/CbzK hexamer and cyclic AllocK/CbzK tetramer peptides precipitate from the reaction mixture and can be collected by centrifugation (5 min, 20000 rpm), the supernatant was discarded. The peptides were resolubilized in 200 μL of 90% methanol 1% AcOH for 2 h at 55° C. (prolonged incubation increases the loss of Alloc and Cbz protection groups). The samples were reduced to 40 μL by evaporation under an air stream; at this point the methanol concentration was maintained above >20% to ensure solubility. The samples were analysed as described above for the linear AllocK/CbzK tetramer peptide.

### Intact Protein Mass Spectrometry

[0613] The inventors carried out ESI-MS using a Waters Xevo G2 mass spectrometer equipped with a modified nanoAcquity LC system. Briefly, injected proteins were separated on a BEH C4 UPLC column (1.7 μm; 1.0×100 mm; Waters) with a flowrate of 50 μL/min. The pump delivered an acetonitrile gradient starting at 2% vol/vol to 80% vol/vol (0.1% vol/vol formic acid) over 20 minutes. The column outlet was directly interfaced via an electrospray ionization source with a hybrid quadrupole time-of-flight mass spectrometer (Waters). While using a cone voltage of 30 V, data were acquired in positive ion mode with a range from 300-2000 m z. Scans were deconvoluted using the MaxEnt1 function within MassLynx software (Waters). The inventors calculated theoretical wild-type protein molecular weights with GPMAW (Lighthouse Data) software and edited them manually to accommodate the molecular weights of ncAAs.

Tandem Mass Spectrometry (MS/MS) of ncAA-Containing Tryptic Peptides

[0614] The inventors purified ubiquitin or GFP proteins containing ncAAs by virtue of their C-terminal His₆ tag, as described above, and ran the purified samples on 4-12% NuPAGE Bis-Tris gels (Invitrogen). Following InstantBlue (Expedeon) staining, the inventors excised gel pieces migrating at the approximate molecular weight of the predicted target protein and subjected them to in-gel trypsin digestion as described previously(37)). Excised protein gel pieces were destained with 50% v/v acetonitrile with 50 mM ammonium bicarbonate. After reduction with 10 mM DTT and alkylation with 55 mM iodoacetamide, the proteins were digested overnight at 37° C. with 6 ng/μL of trypsin (Promega, UK). Tryptic peptides were extracted in 2% v/v formic acid with 2% v/v acetonitrile and subsequently analyzed by nano-scale capillary LC-MS/MS with an Ultimate U3000 HPLC (ThermoScientific Dionex, San Jose, USA) set to a flowrate of 300 nL/min. Peptides were trapped on a C18 Acclaim PepMap100 5 μm, 100 μm×20 mm nanoViper (ThermoScientific Dionex, San Jose, USA) prior to separation on a C18 T3 1.8 μm, 75 μm×250 mm nanoEase column (Waters, Manchester, UK). A gradient of acetonitrile eluted the peptides, and the analytical column outlet was directly interfaced using a nano-flow electrospray ionization source, with a quadrupole Orbitrap mass spectrometer (Q-Exactive HFX, ThermoScientific, USA). For data-dependent analysis a resolution of 60,000 for the full MS spectrum was used, followed by twelve MS/MS. MS spectra were collected over a m/z range of 300-1,800. The resultant LC-MS/MS spectra were searched against a protein database (UniProt KB) using the Mascot search engine program. The database search parameters were restricted to a precursor ion tolerance of 5 p.p.m with a fragmented ion tolerance of 0.1 Da. The inventors set multiple modifications in the search parameters: two missed enzyme cleavages, variable modifications for methionine oxidation, cysteine carbamidomethylation, pyroglutamic acid, lysine to ncAA, threonine to ncAA, and serine to ncAA (ncAA variable based upon experiment). The proteomics software Scaffold 4 was used to visualize the fragmented spectra.

### Example 4—Discussion

[0615] The inventors have evolved Syn61 and deleted the tRNAs and release factor that decode TCG, TCA and TAG codons. They show that the resulting strain provides complete resistance to a cocktail of viruses. Moreover, they demonstrate the encoded incorporation of non-canonical amino acids (ncAAs) in response to all three codons and the encoded, programmable cellular synthesis of entirely non-canonical heteropolymers and macrocycles.

[0616] Thus, the inventors have synthetically uncoupled their strain from the ability to read the canonical code, and this advance provides a potential basis for bioproduction without the catastrophic risks associated with viral contamination and lysis (26, 27). The inventors note that the synthetic codon compression and codon reassignment strategy that they have implemented is analogous to models proposed for codon capture in the course of natural evolution (28).

[0617] Future work will expand the principles exemplified herein to further compress and reassign the genetic code. The inventors anticipate that—in combination with ongoing advances in engineering the translational machinery of cells (4)—this work will enable the programmable and encoded cellular synthesis of an expanded set of non-canonical heteropolymers with emergent, and potentially useful, properties.

### REFERENCES

[0618] 1. F. H. C. Crick, L. Barnett, S. Brenner, R. J. Watts-Tobin, General Nature of the Genetic Code for Proteins. Nature 192, 1227-1232 (1961).
[0619] 2. P. Marliere, The farther, the safer: a manifesto for securely navigating synthetic species away from the old living world. Systems and Synthetic Biology 3, 77 (2009).
[0620] 3. J. W. Chin, Expanding and reprogramming the genetic code. Nature 550, 53-60 (2017).
[0621] 4. D. de la Torre, J. W. Chin, Reprogramming the genetic code. Nature Reviews Genetics 22, 169-184 (2020).
[0622] 5. T. Passioura, H. Suga, Reprogramming the genetic code in vitro. Trends Biochem Sci 39, 400-408 (2014).
[0623] 6. A. C. Forster et al., Programming peptidomimetic syntheses by translating genetic codes designed de novo. Proc Natl Acad Sci USA 100, 6353-6357 (2003).
[0624] 7. M. J. Lajoie et al., Genomically Recoded Organisms Expand Biological Functions. Science 342, 357-360 (2013).
[0625] 8. N. J. Ma, F. J. Isaacs, Genomic Recoding Broadly Obstructs the Propagation of Horizontally Transferred Genetic Elements. Cell Systems 3, 199-207 (2016).
[0626] 9. G. Korkmaz, M. Holm, T. Wiens, S. Sanyal, Comprehensive analysis of stop codon usage in bacteria and its correlation with release factor abundance. J Biol Chem 289, 30334-30342 (2014).
[0627] 10. D. D. Young, P. G. Schultz, Playing with the Molecules of Life. ACS Chemical Biology 13, 854-870 (2018).
[0628] 11. C. C. Liu, P. G. Schultz, Adding New Chemistries to the Genetic Code. Annual Review of Biochemistry 79, 413-444 (2010).
[0629] 12. Y. Zhang et al., A semi-synthetic organism that stores and retrieves increased genetic information. Nature 551, 644-647 (2017).
[0630] 13. E. C. Fischer et al., New codons for efficient production of unnatural proteins in a semisynthetic organism. Nature Chemical Biology 16, 570-576 (2020).
[0631] 14. H. Neumann, K. Wang, L. Davis, M. Garcia-Alai, J. W. Chin, Encoding multiple unnatural amino acids via evolution of a quadruplet-decoding ribosome. Nature 464, 441-444 (2010).
[0632] 15. K. Wang et al., Optimized orthogonal translation of unnatural amino acids enables spontaneous protein double-labelling and FRET. Nature Chemistry 6, 393-403 (2014).
[0633] 16. D. L. Dunkelmann, J. C. W. Willis, A. T. Beattie, J. W. Chin, Engineered triply orthogonal pyrrolysyl-tRNA synthetase/tRNA pairs enable the genetic encoding of three distinct non-canonical amino acids. Nature Chemistry 12, 535-544 (2020).
[0634] 17. J. S. Italia et al., Mutually Orthogonal Nonsense-Suppression Systems and Conjugation Chemistries for Precise Protein Labeling at up to Three Distinct Sites. Journal of the American Chemical Society 141, 6204-6212 (2019).
[0635] 18. J. Fredens et al., Total synthesis of Escherichia coli with a recoded genome. Nature 569, 514-518 (2019).
[0636] 19. W. H. Schmied et al., Controlling orthogonal ribosome subunit interactions enables evolution of new function. Nature 564, 444-448 (2018).
[0637] 20. M. R. Hemm et al., Small Stress Response Proteins in Escherichia coli: Proteins Missed by Classical Proteomic Studies. Journal of Bacteriology 192, 46 (2010).
[0638] 21. S. Meydan et al., Retapamulin-Assisted Ribosome Profiling Reveals the Alternative Bacterial Proteome. Mol Cell 74, 481-493 e486 (2019).
[0639] 22. A. Katz, S. Elgamal, A. Rajkovic, M. Ibba, Non-canonical roles of tRNAs and tRNA mimics in bacterial cell biology. Mol Microbiol 101, 545-558 (2016).
[0640] 23. Z. Su, B. Wilson, P. Kumar, A. Dutta, Noncanonical Roles of tRNAs: tRNA Fragments and Beyond. Annu Rev Genet 54, 47-69 (2020).
[0641] 24. L. You, P. F. Suthers, J. Yin, Effects of Escherichia coli Physiology on Growth of Phage T7 In Vivo and In Silico. Journal of Bacteriology 184, 1888 (2002).
[0642] 25. T. Yanagisawa et al., Multistep Engineering of Pyrrolysyl-tRNA Synthetase to Genetically Encode Ne-(o-Azidobenzyloxycarbonyl) lysine for Site-Specific Protein Modification. Chemistry & Biology 15, 1187-1197 (2008).
[0643] 26. V. Bethencourt, Virus stalls Genzyme plant. Nature Biotechnology 27, 681-681 (2009).
[0644] 27. J. Zahn, M. Halter, in Surveillance and Elimination of Bacteriophage Contamination in an Industrial Fermentation Process. (2018).
[0645] 28. S. Osawa, T. H. Jukes, Codon reassignment (codon capture) in evolution. Journal of Molecular Evolution 28, 271-278 (1989).
[0646] 29. D. Cervettini, K. C. Liu, J. W. Chin, Scripts for Sense Codon Reassignment Enables Viral Resistance and Encoded Polymer Synthesis. Zenodo, (2021).
[0647] 30. D. Cervettini et al., Rapid discovery and evolution of orthogonal aminoacyl-tRNA synthetase-tRNA pairs. Nature Biotechnology 38, 989-999 (2020).
[0648] 31. A. H. Badran, D. R. Liu, Development of potent in vivo mutagenesis plasmids with broad mutational spectra. Nature Communications 6, 8425 (2015).
[0649] 32. K. Wang et al., Defining synonymous codon compression schemes by genome recoding. Nature 539, 59-64 (2016).
[0650] 33. D. E. Deatherage, J. E. Barrick, Identification of mutations in laboratory-evolved microbes from next-generation sequencing data using breseq. Methods Mol Biol 1151, 165-188 (2014).
[0651] 34. H. Thorvaldsdóttir, J. T. Robinson, J. P. Mesirov, Integrative Genomics Viewer (IGV): high-performance genomics data visualization and exploration. Briefings in Bioinformatics 14, 178-192 (2013).
[0652] 35. P. J. A. Cock et al., Biopython: freely available Python tools for computational molecular biology and bioinformatics. Bioinformatics 25, 1422-1423 (2009).
[0653] 36. J. D. Hunter, Matplotlib: A 2D Graphics Environment. Computing in Science & Engineering 9, 90-95 (2007).
[0654] 37. T. S. Elliott et al., Proteome labeling and protein identification in specific tissues and at specific developmental stages in an animal. Nature Biotechnology 32, 465-472 (2014).
[0655] 38. C. Fan, H. Xiong, N. M. Reynolds, D. Söll, Rationally evolving tRNAPyl for efficient incorporation of noncanonical amino acids. Nucleic Acids Research 43, e156-e156 (2015).
[0656] 39. J. N. Beyer et al., Overcoming Near-Cognate Suppression in a Release Factor 1-Deficient Host with an Improved Nitro-Tyrosine tRNA Synthetase. Journal of Molecular Biology 432, 4690-4704 (2020).
[0657] 40. K. C. Schultz et al., A Genetically Encoded Infrared Probe. Journal of the American Chemical Society 128, 13984-13985 (2006).
[0658] 41. A. Telenti et al., The Mycobacterium xenopi GyrA protein splicing element: characterization of a minimal intein. Journal of Bacteriology 179, 6378 (1997).

[0659] Data File S1, Data File S2, and Data File S3 as referred to herein are found in the publication: Wesley E. Robertson, Louise F. H. Funke, Daniel de la Torre, Julius Fredens, Thomas S. Elliott, Martin Spinck, Yonka Christova, Daniele Cervettini, Franz L. Boge, Kim C. Liu, Salvador Buse, Sarah Maslen, George P. C. Salmond, & Jason W. Chin, Sense Codon Reassignment Enables Viral Resistance and Encoded Polymer Synthesis, Science, and are incorporated by reference in their entirety.

The application's sequence listing, which the Patent Office published only in electronic form, follows.

SEQUENCE LISTING (67 sequences)

SEQ ID NO: 1 - protein, 25 aa, Artificial Sequence
  Experimental construct based on ELP
  SITE (14)..(14): Xaa can be any amino acid
VPGVGVPGVGVPGXGVPGVGVPGVG

SEQ ID NO: 2 - DNA, 4582 bp, Artificial Sequence
  Experimental plasmid encoding ELP 9x(TCG)
gagagaagattttcagcctgatacagattaaatcagaacgcagaagcggtctgataaaacagaatttgcctggcggcagtagcgcggtggtcccacctgaccccatgccgaactcagaagtgaaacgccgtagcgccgatggtagtgtggggtctccccatgcgagagtagggaactgccaggcatcaaataaaacgaaaggctcagtcgaaagactgggcctttcgttttatctgttgtttgtcggtgaacgctctcctgagtaggacaaatccgccgggagctgtccctcctgttcagctactgacggggtggtgcgtaacggcaaaagcaccgccggacatcagcgctagcggagtgtatactggcttactatgttggcactgatgagggtgtcagtgaagtgcttcatgtggcaggagaaaaaaggctgcaccggtgcgtcagcagaatatgtgatacaggatatattccgcttcctcgctcactgactcgctacgctcggtcgttcgactgcggcgagcggaaatggcttacgaacggggcggagatttcctggaagatgccaggaagatacttaacagggaagtgagagggccgcggcaaagccgtttttccataggctccgcccccctgacaagcatcacgaaatctgacgctcaaatcagtggtggcgaaacccgacaggactataaagataccaggcgtttccccctggcggctccctcgtgcgctctcctgttcctgcctttcggtttaccggtgtcattccgctgttatggccgcgtttgtctcattccacgcctgacactcagttccgggtaggcagttcgctccaagctggactgtatgcacgaaccccccgttcagtccgaccgctgcgccttatccggtaactatcgtcttgagtccaacccggaaagacatgcaaaagcaccactggcagcagccactggtaattgatttagaggagttagtcttgaagtcatgcgccggttaaggctaaactgaaaggacaagttttggtgactgcgctcctccaagccagttacctcggttcaaagagttggtagctcagagaaccttcgaaaaaccgccctgcaaggcggttttttcgttttcagagcaagagattacgcgcagaccaaaacgatctcaagaagatcatcttattaatcagataaaatatttctagatttcagtgcaatttatctcttcaaatgtagcacctgaagtcagccccatacgatataagttgtaattctcatgtttgacagcttatcatcgataagctttaatgcggtagtttatcacagttaaattgctaacgcagtcaggcaccgtgttttgtttatttttctaaatacattcaaatatgtatccgctcatgagacaataaccctgataaatgcttcaataatattgaaaaaggaagagtatgagtagtgcggtggagtgcaatgtcgtgcaatacgaatggcgaaaagccgagctcatcggtcagcttctcaaccttggggttacccccggcggtgtgctgctggtccacagctccttccgtagcgtccggcccctcgaagatgggccacttggactgatcgaggccctgcgtgctgcgctgggtccgggagggacgctcgtcatgcccagctggagtggtctggacgacgagccgttcgatcctgccacgagccccgttacaccggaccttggagttgtctctgacacattctggcgcctgccaaatgtaaagcgcagcgcccatccatttgcctttgcggcagcggggccacaggcagagcagatcatctctgatccattgcccctgccacctcacagccctgcaagcccggtcgcccgtgtccatgaactcgatgggcaggtacttctcctcggcgtgggacacgatgccaacacgacgctgcatcttgccgagttgatggcaaaggttccctatggggtgccgagacactgcaccattcttcaggatggcaagttggtacgcgtcgattatctcgagaatgaccactgctgtgagcgctttgccttggcggacaggtggctcaaggagaagagccttcagaaggaaggtccagtcggtcatgcctttgctcggttgatccgctcccgcgacattgtggcgacagccctgggtcaactgggccgagatccgttgatcttcctgcatccgccagaggcgggatgcgaagaatgcgatgccgctcgccagagcattggctgaatggaagccggcggcacctcgctaacggattcaccactccaagaattggagccaatcaattcttgcggagaactgtgaatgcgcaaaccaacccttggcagaacatatccatcgcgtgcggccgcgtctccgggagctgcatgtgtcagaggttttcaccgtcatcaccgaaacgcgcgaggcagcagatcaattcgcgcgcgaaggcgaagcggcatgcataatgtgcctgtcaaatggacgaagcagggattctgcaaaccctatgctactccgtcaagccgtcaattgtctgattcgttaccaattatgacaacttgacggctacatcattcactttttcttcacaaccggcacggaactcgctcgggctggccccggtgcattttttaaatacccggctgaaatagagttgatcgtcaaaaccaacattgcgaccgacggtggcgataggcatccgggtggtgctcaaaagcagcttcgcctggctgatacgttggtcctcgcgccagcttaagacgctaatccctaactgctggcggaaaagatgactcagacggctcgggctcaagcaaacatgctgtgcgacgctggcgatatcaaaattgctgtctgccaggtgatcgctgatgtactgacaagcctcgcgtacccgattatccatcggtggatggaggctctcgttaatcgcttccatgcgccgcagtaacaattgctcaagcagatttatcgccagcagctcgctatagcgcccttccccttgcccggcgttaatgatttgcccaaacaggtcgctgaaatgcggctggtgcgcttcatccgggcgaaagaaccccgtattggcaaatatactcggccagttaagccattcatgccagtaggcgcgcggacgaaagtaaacccactggtgataccattcgcgagcctccggatgacgaccgtagtgatgaatctctcctggcgggaacagcaaaatatcacccggtcggcaaacaaattctcgtccctgatttttcaccaccccctgaccgcgaatggtgagattgagaatataacctttcattcccagcggtcggtcgataaaaaaatcgagataaccgttggcctcaatcggcgttaaacccgccaccagatgggcattaaagctgtatcccggcagcaggggatcattttgcgcttcagccatacttttcatactcccgccattcagagaagaaaccaattgtccatattgcatcagacattgccgtcactgcgtcttttactggctcttctcgctaaccaaaccggtaaccccgcttattaaaagcattctgtaacaaagcgggaccaaagccatgacaaaaacgcgtaacaaaagtgtctataatcacggcagaaaagtccacattgattatttgcacggcgtcacactttgctatgccatagcatttttatccataagattagcggatcctacctgacgctttttatcgcaactctctactgtttctccatacccgttttttgggctaacaggaggaattaaccatggttccaggtgttggcgtaccgggtgtaggcgttccgggttcgggtgttccaggcgtaggtgtaccgggtgtaggtgttccaggtgttggcgtaccgggtgtaggcgttccgggttcgggtgttccaggcgtaggtgtaccgggtgtaggtgttccaggtgttggcgtaccgggtgtaggcgttccgggttcgggtgttccaggcgtaggtgtaccgggtgtaggtgttccaggtgttggcgtaccgggtgtaggcgttccgggttcgggtgttccaggcgtaggtgtaccgggtgtaggtgttccaggtgttggcgtaccgggtgtaggcgttccgggttcgggtgttccaggcgtaggtgtaccgggtgtaggtgttccaggtgttggcgtaccgggtgtaggcgttccgggttcgggtgttccaggcgtaggtgtaccgggtgtaggtgttccaggtgttggcgtaccgggtgtaggcgttccgggttcgggtgttccaggcgtaggtgtaccgggtgtaggtgttccaggtgttggcgtaccgggtgtaggcgttccgggttcgggtgttccaggcgtaggtgtaccgggtgtaggtgttccaggtgttggcgtaccgggtgtaggcgttccgggttcgggtgttccaggcgtaggtgtaccgggtgtaggtgttccagggcttcgagcgaagcttgggcccgaacaaaaactcatcagtgaagaggatctgaatagcgccgtcgaccatcatcatcatcatcattgagtttaaacggtctccagcttggctgttttggcggat

SEQ ID NO: 3 - DNA, 3979104 bp, Artificial Sequence (residues 1-1,989,552 of 3,979,104)
  Synthetic E.coli genome
agcttttcattctgactgcaacgggcaatatgtctctgtgtggattaaaaaaagagtgtctgatagcagcttctgaactggttacctgccgtgagtaaattaaaattttattgacttaggtcactaaatactttaaccaatataggcatagcgcacagacagataaaaattacagagtacacaacatccatgaaacgcattagcaccaccattaccaccaccatcaccattaccacaggtaacggtgcgggctgacgcgtacaggaaacacagaaaaaagcccgcacctgacagtgcgggctttttttttcgaccaaaggtaacgaggtaacaaccatgcgagtgttgaagttcggcggtacaagtgtggcaaatgcagaacgttttctgcgtgttgccgatattctggaaagcaatgccaggcaggggcaggtggccaccgtcctctctgcccccgccaaaatcaccaaccacctggtggcgatgattgaaaaaaccattagcggccaggatgctttacccaatatcagcgatgccgaacgtatttttgccgaacttttgacgggactcgccgccgcccagccggggttcccgctggcgcaattgaaaactttcgtcgatcaggaatttgcccaaataaaacatgtcctgcatggcattagtttgttggggcagtgcccggatagcatcaacgctgcgctgatttgccgtggcgagaaaatgagcatcgccattatggccggcgtattagaagcgcgcggtcacaacgttactgttatcgatccggtcgaaaaactgctggcagtggggcattacctcgaatctaccgtcgatattgctgagtccacccgccgtattgcggcaagccgcattccggctgatcacatggtgctgatggcaggtttcaccgccggtaatgaaaaaggcgaactggtggtgcttggacgcaacggttccgactactctgctgcggtgctggctgcctgtttacgcgccgattgttgcgagatttggacggacgttgacggggtctatacctgcgacccgcgtcaggtgcccgatgcgaggttgttgaagagcatgtcctaccaggaagcgatggagctttcctacttcggcgctaaagttcttcacccccgcaccattacccccatcgcccagttccagatcccttgcctgattaaaaataccggaaatcctcaagcaccaggtacgctcattggtgccagccgtgatgaagacgaattaccggtcaagggcatttccaatctgaataacatggcaatgttcagcgtttctggtccggggatgaaagggatggtcggcatggcggcgcgcgtctttgcagcgatgagtcgcgcccgtatttccgtggtgctgattacgcaaagttcttccgaatacagcatcagtttctgcgttccacaaagcgactgtgtgcgagctgaacgggcaatgcaggaagagttctacctggaactgaaagaaggcttactggagccgctggcagtgacggaacggctggccattatcagcgtggtaggtgatggtatgcgcaccttgcgtgggatcagcgcgaaattctttgccgcactggcccgcgccaatatcaacattgtcgccattgctcagggatcttctgaacgcagtatctctgtcgtggtaaataacgatgatgcgaccactggcgtgcgcgttactcatcagatgctgttcaataccgatcaggttatcgaagtgtttgtgattggcgtcggtggcgttggcggtgcgctgctggagcaactgaagcgtcagcaaagctggctgaagaataaacatatcgacttacgtgtctgcggtgttgccaacagcaaggctctgctcaccaatgtacatggccttaatctggaaaactggcaggaagaactggcgcaagccaaagagccgtttaatctcgggcgcttaattcgcctcgtgaaagaatatcatctgctgaacccggtcattgttgactgcacttccagccaggcagtggcggatcaatatgccgacttcctgcgcgaaggtttccacgttgtcacgccgaacaaaaaggccaacaccagcagcatggattactaccatcagttgcgttatgcggcggaaaaaagccggcgtaaattcctctatgacaccaacgttggggctggattaccggttattgagaacctgcaaaatctgctcaatgcaggtgatgaattgatgaagttctccggcattctttctggtagcctttcttatatcttcggcaagttagacgaaggcatgagtttctccgaggcgaccacgctggcgcgggaaatgggttataccgaaccggacccgcgagatgatctttctggtatggatgtggcgcgtaaactattgattctcgctcgtgaaacgggacgtgaactggagctggcggatattgaaattgaacctgtgctgcccgcagagtttaacgccgagggtgatgttgccgcttttatggcgaatctgagtcaactcgacgatctctttgccgcgcgcgtggcgaaggcccgtgatgaaggaaaagttttgcgctatgttggcaatattgatgaagatggcgtctgccgcgtgaagattgccgaagtggatggtaatgatccgctgttcaaagtgaaaaatggcgaaaacgccctggccttctatagccactattatcagccgctgccgttggtactgcgcggatatggtgcgggcaatgacgttacagctgccggtgtctttgctgatctgctacgtaccctcagttggaagttaggagtctgacatggttaaagtttatgccccggcttccagtgccaatatgagcgtcgggtttgatgtgctcggggcggcggtgacacctgttgatggtgcattgctcggagatgtagtcacggttgaggcggcagagacattcagtctcaacaacctcggacgctttgccgataagctgccgagtgaaccacgggaaaatatcgtttatcagtgctgggagcgtttttgccaggaactgggtaagcaaattccagtggcgatgaccctggaaaagaatatgccgatcggtagcggcttaggctccagtgcctgtagcgtggtcgcggcgctgatggcgatgaatgaacactgcggcaagccgcttaatgacactcgtttgctggctttgatgggcgagctggaaggccgtatctccggcagcattcattacgacaacgtggcaccgtgttttctcggtggtatgcagttgatgatcgaagaaaacgacatcatcagccagcaagtgccagggtttgatgagtggctgtgggtgctggcgtatccggggattaaagtcagcacggcagaagccagggctattttaccggcgcagtatcgccgccaggattgcattgcgcacgggcgacatctggcaggcttcattcacgcctgctattcccgtcagcctgagcttgccgcgaagctgatgaaagatgttatcgctgaaccctaccgtgaacggttactgccaggcttccggcaggcgcggcaggcggtcgcggaaatcggcgcggtagcgagcggtatctccggctccggcccgaccttgttcgctctgtgtgacaagccggaaaccgcccagcgcgttgccgactggttgggtaagaactacctgcaaaatcaggaaggttttgttcatatttgccggctggatacggcgggcgcacgagtactggaaaactaaatgaaactctacaatctgaaagatcacaacgagcaggtcagctttgcgcaagccgtaacccaggggttgggcaaaaatcaggggctgttttttccgcacgacctgccggaattcagcctgactgaaattgatgagatgctgaagctggattttgtcacccgcagtgcgaagatcctcagcgcgtttattggtgatgaaatcccacaggaaatcctggaagagcgcgtgcgcgcggcgtttgccttcccggctccggtcgccaatgttgaaagcgatgtcggttgtctggaattgttccacgggccaacgctggcatttaaagatttcggcggtcgctttatggcacaaatgctgacccatattgcgggtgataagccagtgaccattctgaccgcgacctccggtgataccggagcggcagtggctcatgctttctacggtttaccgaatgtgaaagtggttatcctctatccacgaggcaaaatcagtccactgcaagaaaaactgttctgtacattgggcggcaatatcgaaactgttgccatcgacggcgatttcgatgcctgtcaggcgctggtgaagcaggcgtttgatgatgaagaactgaaagtggcgctagggttaaacagcgctaacagcattaacatcagccgtttgctggcgcagatttgctactactttgaagctgttgcgcagctgccgcaggagacgcgcaaccagctggttgtcagcgtgccaagcggaaacttcggcgatttgacggcgggtctgctggcgaagagtctcggtctgccggtgaaacgttttattgctgcgaccaacgtgaacgataccgtgccacgtttcctgcacgacggtcagtggagtcccaaagcgactcaggcgacgttatccaacgcgatggacgtgagtcagccgaacaactggccgcgtgtggaagagttgttccgccgcaaaatctggcaactgaaagagctgggttatgcagccgtggatgatgaaaccacgcaacagacaatgcgtgagttaaaagaactgggctacactagcgagccgcacgctgccgtagcttatcgtgcgctgcgtgatcagttgaatccaggcgaatatggcttgttcctcggcaccgcgcatccggcgaaatttaaagagagcgtggaagcgattctcggtgaaacgttggatctgccaaaagagctggcagaacgtgctgatttacccttgcttagtcataatctgcccgccgattttgctgcgttgcgtaaattgatgatgaatcatcagtaaaatctattcattatctcaatcaggccgggtttgcttttatgcagcccggcttttttatgaagaaattatggagaaaaatgacagggaaaaaggagaaattctcaataaatgcggtaacttagagattaggattgcggagaataacaaccgccgttctcatcgagtaatctccggatatcgacccataacgggcaatgataaaaggagtaacctgtgaaaaagatgcaatctatcgtactcgcactttccctggttctggtcgctcccatggcagcacaggctgcggaaattacgttagtcccgagtgtaaaattacagataggcgatcgtgataatcgtggctattactgggatggaggtcactggcgcgaccacggctggtggaaacaacattatgaatggcgaggcaatcgctggcacctacacggaccgccgccaccgccgcgccaccataagaaagctcctcatgatcatcacggcggtcatggtccaggcaaacatcaccgctaaatgacaaatgccgggtaacaatccggcattcagcgcctgatgcgacgctggcgcgtcttatcaggcctacgttaattctgcaatatattgaatctgcatgcttttgtaggcaggataaggcgttcacgccgcatccggcattgactgcaaacttaacgctgctcgtagcgtttaaacaccagttcgccattgctggaggaatcttcatcaaagaagtaaccttcgctattaaaaccagtcagttgctctggtttggtcagccgattttcaataatgaaacgactcatcagaccgcgtgctttcttagcgtagaagctgatgatcttaaatttgccgttcttctcatcgaggaacaccggcttgataatctcggcattcaatttcttcggcttcacgcttttaaaatactcatcactcgccagattaatcaccacattatcgccttgtgctgcgagcgcctcgttcagcttgttggtgatgatatctccccagaattgatacagatctttccctcgggcattctcaagacggatccccatttccagacgataaggctgcattaaatcgagcgggcggagtacgccatacaagccggaaagcattcgcaaatgctgttgggcaaaatcgaaatcgtcttcgctgaaggtttcggcctgcaagccggtgtagacatcacctttaaacgccagaatcgcctggcgggcattcgccggcgtgaaatctggctgccagtcatgaaagcgagcggcgttgatacccgccagtttgtcgctgatgcgcatcagcgtgctaatctgcggaggcgtcagtttccgcgcctcatggatcaactgctgggaattgtctaacagctccggcagcgtatagcgcgtggtggtcaacgggctttggtaatcaagcgttttcgcaggactaataagaatcagcatatccagtccttgcaggaaatttatgccgactttagcaaaaaatgagaatgagttgatcgatagttgtgattactcctggctaacatcatcccacgcgtccggagaaagctggcgaccgatatccggataacgcaatggatcaaacaccgggcgcacgccgagtttacgctggcgtagataatcactggcaatggtatgaaccacagggctgagcagtaaaatggcggtcaaattggtaatagccatgcaggccattatgatatctgccagttgccacatcagcggaaggcttagcaaggtgccgccgatgaccgttgcgaaggtgcagatccgcaaacaccagatcgctttagggttgttcaggcgtaaaaagaagagattgttttcggcataaatgtagttggcaacgatggagctgaaggcaaacagaataaccacaagggtaacaaactcagcaccccaggaacccattagcacccgcatcgccttctggataagctgaataccttccagcggcatgtaggttgtgccgttacccgccagtaatatcagcatggcgcttgccgtacagatgaccagggtgtcgataaaaatgccaatcatctggacaatcccttgcgctgccggatgcggaggccaggacgccgctgccgctgccgcgtttggcgtgctacccattcccgcctcattggaaaacatactgcgctgaaaaccgttagtaatcgcctggcttaaggtatatcccgccgcgccgcctgccgcttcctgccagccaaaagcactctcaaaaatagaccaaatgacgtggggaagttgcccgatattcattacgcaaattaccaggctggtcagtacccagattatcgccatcaacgggacaaagccctgcatgagccgggcgacgccatgaagaccgcgagtgattgccagcagagtaaagacagcgagaataatgcctgtcaccagcgggggaaaatcaaaagaaaaactcagggcgcgggcaacggcgttcgcttgaactccgctgaaaattatgccataggcgatgagcaaaaagacggcgaacagaacgcccatccagcgcatccccagcccgcgcgccatataccatgccggtccgccacgaaactgcccattgacgtcacgttctttataaagttgtgccagagaacattcggcaaagctggtcgccatgccgataaacgcggcaacccacatccaaaagacggctccaggtccaccggcggtaatagccagcgcaacgccggccaggttgccgctacccacgcgcgccgcaagactggtacacaaactctgaaaactggttaaaccgcctggctgtggatgaatgctatttttaagacttttgccaaactggcggatgtagcgaaactgcacaaatccggtgcgaaaagtgaaccaacaacctgcgccgaagagcaggtaaatcattacgcttccccaaaggacgctgttaatgaaggagaaaaaatctggcatgcatatccctcttattgccggccgcgatgactttcctgtgtaaacgttaccaattgtttaagaagtatatacgctacgaggtacttgataacttctgcgtagcatacatgaggttttgtataaaaatggcgggcgatatcaacgcagtgtcagaaatccgaaacagtctcgcctggcgataaccgtcttgtcggcggttgcgctgacgttgcgtcgtgatatcatcagggcagaccggttacatccccctaacaagctgtttaaagagaaatactatcatgacggacaaattgacctcccttcgtcagtacaccaccgtagtggccgacactggggacatcgcggcaatgaagctgtatcaaccgcaggatgccacaaccaacccttctctcattcttaacgcagcgcagattccggaataccgtaagttgattgatgatgctgtcgcctgggcgaaacagcagagcaacgatcgcgcgcagcagatcgtggacgcgaccgacaaactggcagtaaatattggtctggaaatcctgaaactggttccgggccgtatcagtactgaagttgatgcgcgtctttcctatgacaccgaagcgagtattgcgaaagcaaaacgcctgatcaaactctacaacgatgctggtattagcaacgatcgtattctgatcaaactggcttctacctggcagggtatccgtgctgcagaacagctggaaaaagaaggcatcaactgtaacctgaccctgctgttctccttcgctcaggctcgtgcttgtgcggaagcgggcgtgttcctgatcagcccgtttgttggccgtattcttgactggtacaaagcgaataccgataagaaagagtacgctccggcagaagatccgggcgtggtttctgtatctgaaatctaccagtactacaaagagcacggttatgaaaccgtggttatgggcgcaagcttccgtaacatcggcgaaattctggaactggcaggctgcgaccgtctgaccatcgcaccggcactgctgaaagagctggcggagagcgaaggggctatcgaacgtaaactgtcttacaccggcgaagtgaaagcgcgtccggcgcgtatcactgagtccgagttcctgtggcagcacaaccaggatccaatggcagtagataaactggcggaaggtatccgtaagtttgctattgaccaggaaaaactggaaaaaatgatcggcgatctgctgtaatcattcttagcgtgaccgggaagtcggtcacgctacctcttctgaagcctgtctgtcactcccttcgcagtgtatcattctgtttaacgagactgtttaaacggaaaaatcttgatgaatactttacgtattggcttagtttccatctctgatcgcgcatccagcggcgtttatcaggataaaggcatccctgcgctggaagaatggctgacaagcgcgctaaccacgccgtttgaactggaaacccgcttaatccccgatgagcaggcgatcatcgagcaaacgttgtgtgagctggtggatgaaatgagttgccatctggtgctcaccacgggcggaactggcccggcgcgtcgtgacgtaacgcccgatgcgacgctggcagtagcggaccgcgagatgcctggctttggtgaacagatgcgccagatcagcctgcattttgtaccaactgcgatccttagccgtcaggtgggcgtgattcgcaaacaggcgctgatccttaacttacccggtcagccgaagtctattaaagagacgctggaaggtgtgaaggacgctgagggtaacgttgtggtacacggtatttttgccagcgtaccgtactgcattcagttgctggaagggccatacgttgaaacggcaccggaagtggttgcagcattcagaccgaagagtgcaagacgcgacgttagcgaataaaaaaatccccccgagcggggggatctcaaaacaattagtgggattcaccaatcggcagaacggtgcgaccaaactgctcgttcagtacttcacccatcgccagatagattgcgctggcaccgcagatcagcccaatccagccggcaaagtggatgattgcggcgttaccggcaatgttaccgatcgccagcagggcaaacagcacggtcaggctaaagaaaacgaattgcagaacgcgtgcgcctttcagcgtgccgaagaacataaacagcgtaaatacgccccacagacccaggtagacaccaaggaactgtgcatttggcgcatcggtcagacccagtttcggcatcagcagaatcgcaaccagcgtcagccagaaagaaccgtaagaggtgaatgcggttaaaccgaaagtgttgccttttttgtactccagcagaccagcaaaaatttgcgcgatgccgccgtagaaaatgcccatggcaagaataataccgtccagagcgaaataacccacgttgtgcaggttaagcagaatggtggtcatgccgaagcccatcaggcccagcggtgccggattagccaacttagtgttgcccataattcctcaaaaatcatcatcgaatgaatggtgaaataatttccctgaataactgtagtgttttcagggcgcggcataataatcagccagtggggcagtgtctacgatcttttgaggggaaaatgaaaattttccccggtttccggtatcagacctgagtggcgctaaccatccggcgcaggcaggcgatttgcagtacggctggaatcgtcacgcgataggcgctgccgctgaccgctttaaccccatttagtgccgcacctacagggcctcccagccccgcgccgcgcagcaaaccatgcccaagtacgctcattgctgcgtgggtgcgtaaaatgcgggtcagttggctggaaagcaaatggctcacaccttttgccaataatttgtctttcatcagcagcggcagcagctcttccagctcattcaccctggcatcgaccgcgtgcagaaactcctgcttatgttcctcgtccattttcttccaggtattacgcagaaattgttccagtaactgttgctcaatttcaaacgtagacatctctttgtcggctttcagcttcaatcgcttactaacatcgagcaaaatggcccgatacaatttaccgtgtccgcgcagtttgttggcgatactatcgccaccaaaatgctgtaattctccggcaatcagctgccagttgcggcgatgttgctcgggatgcccttccatgcttttaaacagttcgttgcgcatcagtacgctggagaggcgagttttgcctttttcattatgggtgagcaatcgggcgaaatttgccaactgttcctcactacaatgctgaagaaaatccagatcactatcattcaggtaattaacattcattttttgtggcttctatattctggcgttagtcgtcgccgataattttcagcgtggccatatcgctactgttcaccgtatgaccgctaaaggtgattttactgacgcagcgtttattgtcgttatcgctgttaatgttgatccagtcagtggtttgcccttcttttatttcactaggaatattcaggctctgactggcgctacgggcggctttgaaataaacgcttgcaccgcttaactgtaaatcgccatggtcggcagagagttgtatgcgtttcacaatgcgacaaacaggaagtttcagcgccagatcgttggtttcgttacgcggcattgcaatggcgccgaggagtttatggtcgtttgcctgcgccgtgcagcacagcatcaggctaatcgccaggctggcggaaatcgtaaaaacggatttcataaggattctcttagtgggaagaggtagggggatgaatacccactagtttactgctgataaagagaagattcaggcacgtaatcttttctttttattacaattttttgatgaatgccttggctgcgattcattctttatatgaataaaattgctgtcaattttacgtcttgtcctgccatatcgcgaaatttctgcgcaaaagcacaaaaaatttttgcatctcccccttgatgacgtggtttacgaccccatttagtagtcaaccgcagtgagtgagtctgcaaaaaaatgaaattgggcagttgaaaccagacgtttcgcccctattacagactcacaaccacatgatgaccgaatatatagtggagacgtttagatgggtaaaataattggtatcgacctgggtactaccaactcttgtgtagcgattatggatggcaccactcctcgcgtgctggagaacgccgaaggcgatcgcaccacgccttctatcattgcctatacccaggatggtgaaactctagttggtcagccggctaaacgtcaggcagtgacgaacccgcaaaacactctgtttgcgattaaacgcctgattggtcgccgcttccaggacgaagaagtacagcgtgatgtttccatcatgccgttcaaaattattgctgctgataacggcgacgcatgggtcgaagttaaaggccagaaaatggcaccgccgcagatttctgctgaagtgctgaaaaaaatgaagaaaaccgctgaagattacctgggtgaaccggtaactgaagctgttatcaccgtaccggcatactttaacgatgctcagcgtcaggcaaccaaagacgcaggccgtatcgctggtctggaagtaaaacgtatcatcaacgaaccgaccgcagctgcgctggcttacggtctggacaaaggcactggcaaccgtactatcgcggtttatgacctgggtggtggtactttcgatatttctattatcgaaatcgacgaagttgacggcgaaaaaaccttcgaagttctggcaaccaacggtgatacccacctggggggtgaagacttcgacagccgtctgatcaactatctggttgaagaattcaagaaagatcagggcattgacctgcgcaacgatccgctggcaatgcagcgcctgaaagaagcggcagaaaaagcgaaaatcgaactgtcttccgctcagcagaccgacgttaacctgccatacatcactgcagacgcgaccggtccgaaacacatgaacatcaaagtgactcgtgcgaaactggaaagcctggttgaagatctggtaaaccgttccattgagccgctgaaagttgcactgcaggacgctggcctgtccgtatctgatatcgacgacgttatcctcgttggtggtcagactcgtatgccaatggttcagaagaaagttgctgagttctttggtaaagagccgcgtaaagacgttaacccggacgaagctgtagcaatcggtgctgctgttcagggtggtgttctgactggtgacgtaaaagacgtactgctgctggacgttaccccgctgtctctgggtatcgaaaccatgggcggtgtgatgacgacgctgatcgcgaaaaacaccactatcccgaccaagcacagccaggtgttctctaccgctgaagacaaccagtctgcggtaaccatccatgtgctgcagggtgaacgtaaacgtgcggctgataacaaatctctgggtcagttcaacctagatggtatcaacccggcaccgcgcggcatgccgcagatcgaagttaccttcgatatcgatgctgacggtatcctgcacgtttccgcgaaagataaaaacagcggtaaagagcagaagatcaccatcaaggcttcttctggtctgaacgaagatgaaatccagaaaatggtacgcgacgcagaagctaacgccgaagctgaccgtaagtttgaagagctggtacagactcgcaaccagggcgaccatctgctgcacagcacccgtaagcaggttgaagaagcaggcgacaaactgccggctgacgacaaaactgctatcgagtctgcgctgactgcactggaaactgctctgaaaggtgaagacaaagccgctatcgaagcgaaaatgcaggaactggcacaggtttcccagaaactgatggaaatcgcccagcagcaacatgcccagcagcagactgccggtgctgatgcttctgcaaacaacgcgaaagatgacgatgttgtcgacgctgaatttgaagaagtcaaagacaaaaaataatcgccctataaacgggtaattatactgacacgggcgaaggggaatttcctctccgcccgtgcattcatctaggggcaatttaaaaaagatggctaagcaagattattacgagattttaggcgtttccaaaacagcggaagagcgtgaaatcagaaaggcctacaaacgcctggccatgaaataccacccggaccgtaaccagggtgacaaagaggccgaggcgaaatttaaagagatcaaggaagcttatgaagttctgaccgacagccaaaaacgtgcggcatacgatcagtatggtcatgctgcgtttgagcaaggtggcatgggcggcggcggttttggcggcggcgcagacttcagcgatatttttggtgacgttttcggcgatatttttggcggcggacgtggtcgtcaacgtgcggcgcgcggtgctgatttacgctataacatggagctcaccctcgaagaagctgtacgtggcgtgaccaaagagatccgcattccgactctggaagagtgtgacgtttgccacggtagcggtgcaaaaccaggtacacagccgcagacttgtccgacctgtcatggttctggtcaggtgcagatgcgccagggattcttcgctgtacagcagacctgtccacactgtcagggccgcggtacgctgatcaaagatccgtgcaacaaatgtcatggtcatggtcgtgttgagcgcagcaaaacgctgtccgttaaaatcccggcaggggtggacactggagaccgcatccgtcttgcgggcgaaggtgaagcgggcgagcatggcgcaccggcaggcgatctgtacgttcaggttcaggttaaacagcacccgattttcgagcgtgaaggcaacaacctgtattgcgaagtcccgatcaacttcgctatggcggcgctgggtggcgaaatcgaagtaccgacccttgatggtcgcgtcaaactgaaagtgcctggcgaaacccagaccggtaagctattccgtatgcgcggtaaaggcgtcaagtctgtccgcggtggcgcacagggtgatttgctgtgccgcgttgtcgtcgaaacaccggtaggcctgaacgaaaggcagaaacagctgctgcaagagctgcaagaaagcttcggtggcccaaccggcgagcacaacagcccgcgcagtaagagcttctttgatggtgtgaagaagttttttgacgacctgacccgctaacctccccaaaagcctgcccgtgggcaggcctgggtaaaaatagggtgcgttgaagatatgcgagcacctgtaaagtggcggggatcactctacctcaatgtgtatcacaatatccatattctttgtgggggagtctggagattgagtagatattcttgttcagaatgtatcagccgatggttctacgattcttaagccacgaagagttcagatagtacaacggcatgtctcttttgactatctggcaaccggcagtgtgttctctcacgcatcacaaaagcagcaggcataaaaaaacccgcttgcgcgggctttttcacaaagcttcagcaaattggcgattaagccagtttgttgatctgtgcagtcaggttagccttatgacgtgcagctttgtttttgtggatcagacctttagcagcctgacggtccacgatcggttgcatttcgttaaatgctttctgtgcagcagctttgtcgccagcttcgatagctgcgtatactttcttgatgaaagtacgcatcatagagcgacggcttgcgttgtgcttacgagccttttcagactgaatggcgcgcttcttagcacttttgatattagccaaggtccaactcccaaatgtgttctatatggacaattcaaaggccgaggaatatgcccttttagccttcttttgtcaatggatttgtgcaaataagcgccgttaatgtgccggcacagcttacgtagtgatggcgcaggattctaccagcttgcggggtgtgaatacagcttttccgcgataaaaattgcagcaggcggtcagtttcttcccgtgatttgcgccatggcaatgaaaagccacttctttctgattagcgtactcaatcgccggttaaccttgaccgctgtacaaggtatactcggacgatttagcctgttttgagccagacatgaagctgatacgcggcatacataatctcagccaggccccgcaagaagggtgtgtgctgactattggtaatttcgacggcgtgcatcgcggtcatcgcgcgctgttacagggcttgcaggaagaagggcgcaagcgcaacttaccggtgatggtgatgctttttgaacctcaaccactggaactgtttgctaccgataaagccccggcaagactgacccggctgcgggaaaaactgcgttaccttgcagagtgtggcgttgattacgtgctgtgcgtgcgtttcgacaggcgtttcgcggcgttaaccgcgcaaaatttcatcagcgatcttctggtgaagcatttgcgcgtaaaatttcttgccgtaggtgatgatttccgctttggcgctggtcgtgaaggcgatttcttgttattacagaaagctggcatggaatacggcttcgatatcaccagtacgcaaactttttgcgaaggtggcgtgcgcatcagcagcaccgccgtgcgtcaggcccttgcggatgacaatctggctctggcagagagtttactggggcacccgtttgccatctccgggcgtgtagtccacggtgatgaattagggcgcactataggtttcccgacggcgaatgtaccgctgcgccgtcaggtttccccggtgaaaggggtttatgcggtagaagtgctgggcctcggtgaaaagccgttacccggcgtggcaaacatcggaacacgcccaacggttgccggtattcgccagcagctggaagtgcatttgttagatgttgcaatggacctttacggtcgccatatacaagtagtgctgcgtaaaaaaatacgcaatgagcagcgatttgcgagcctggacgaactgaaagcgcagattgcgcgtgatgaattaaccgcccgcgaattttttgggctaacaaaaccggcttaagcctgttatgtaatcaaaccgaaatacggaaccgagaatctgatgagtgactataaaagtaccctgaatttgccggaaacagggttcccgatgcgtggcgatctcgccaagcgcgaacccggaatgctggcgcgttggactgatgatgatctgtacggcatcatccgtgcggctaaaaaaggcaaaaaaaccttcattctgcatgatggccctccttatgcgaatggcagcattcatattggtcacagcgttaacaagattctgaaagacattatcgtgaagtccaaagggctttccggttatgacagcccgtatgtgcctggctgggactgccacggtctgccgatcgagctgaaagtcgagcaagaatacggtaagccgggtgagaaattcaccgccgccgagttccgcgccaagtgccgcgaatacgcggcgacccaggttgacggtcaacgcaaagactttatccgtctgggcgtgctgggcgactggagccacccgtacctgaccatggacttcaaaactgaagccaacatcatccgcgcgctgggcaaaatcatcggcaacggtcacctgcacaaaggcgcgaagccagttcactggtgcgttgactgccgttctgcgctggcggaagcggaagttgagtattacgacaaaacttctccgtccatcgacgttgctttccaggcagtcgatcaggatgcactgaaagcaaaatttgccgtaagcaacgttaacggcccaatcagcctggtaatctggaccaccacgccgtggactctgcctgccaaccgcgcaatctctattgcaccagatttcgactatgcgctggtgcagatcgacggtcaggccgtgattctggcgaaagatctggttgaaagcgtaatgcagcgtatcggcgtgaccgattacaccattctcggcacggtaaaaggtgcggagcttgagctgctgcgctttacccatccgtttatgggcttcgacgttccggcaatcctcggcgatcacgttaccctggatgccggtaccggtgccgttcacaccgcgcctggccacggcccggacgactatgtgatcggtcagaaatacggcctggaaaccgctaacccggttggcccggacggcacttatctgccgggcacttatccgacgctggatggcgtgaacgtcttcaaagcgaacgacatcgtcgttgcgctgctgcaggaaaaaggcgcgctgctgcacgttgagaaaatgcagcacagctatccgtgctgctggcgtcacaaaacgccgatcatcttccgcgcgacgccgcagtggttcgtcagcatggatcagaaaggtctgcgtgcgcagagtctgaaagagatcaaaggcgtgcagtggatcccggactggggccaggcgcgtatcgagagcatggttgctaaccgtcctgactggtgtatctcccgtcagcgcacctggggtgtaccgatgagtctgttcgtgcacaaagacacggaagagctgcatccgcgtacccttgaactgatggaagaagtggcaaaacgcgttgaagtcgatggcatccaggcgtggtgggatctcgatgcgaaagagatcctcggcgacgaagctgatcagtacgtgaaagtgccggacacattggatgtatggtttgactccggatctacccactcttctgttgttgacgtgcgtccggaatttgccggtcacgcagcggacatgtatctggaaggttctgaccaacaccgcggctggttcatgtcttccctaatgatctccaccgcgatgaagggtaaagcgccgtatcgtcaggtactgacccacggctttaccgtggatggtcagggccgcaagatgtctaaatccatcggcaataccgttagcccgcaggatgtgatgaacaaactgggcgcggatattctgcgtctgtgggtggcaagtaccgactacaccggtgaaatggccgtttctgacgagatcctgaaacgtgctgccgatagctatcgtcgtatccgtaacaccgcgcgcttcctgctggcaaacctgaacggttttgatccagcaaaagatatggtgaaaccggaagagatggtggtactggatcgctgggccgtaggttgtgcgaaagcggcacaggaagacatcctcaaggcgtacgaagcatacgatttccacgaagtggtacagcgtctgatgcgcttctgctccgttgagatgggttccttctacctcgacatcatcaaagaccgtcagtacaccgccaaagcggacagtgtggcgcgtcgtagctgccagactgcgctatatcacatcgcagaagcgctggtgcgctggatggcaccaatcctctccttcaccgctgatgaagtgtggggctacctgccgggcgaacgtgaaaaatacgtcttcaccggtgagtggtacgaaggcctgtttggcctggcagacagtgaagcgatgaacgatgcgttctgggacgagctgttgaaagtgcgtggcgaagtgaacaaagtcattgagcaagcgcgtgccgacaagaaagtgggtggcagcctggaagcggcagtaaccttgtatgcagaaccggaactgagcgcgaaactgaccgcgctgggcgatgaattacgatttgtcctgttgacctccggcgctaccgttgcagactataacgacgcacctgctgatgctcagcagagcgaagtactcaaagggctgaaagtcgcgttgagtaaagccgaaggtgagaagtgcccacgctgctggcactacacccaggatgtcggcaaggtggcggaacacgcagaaatctgcggccgctgtgtcagcaacgtcgccggtgacggtgaaaaacgtaagtttgcctgatgagtcaaagcatctgtagtacagggctacgctggctgtggctggtggtagtcgtgctgattatcgatctgggcagcaaatacctgatcctccagaactttgctctgggggatacggtcccgctgttcccgagccttaatctgcattatgcgcgtaactatggcgcggcgtttagtttccttgccgatagcggcggctggcagcgttggttctttgccggtattgcgattggtattagcgtgatcctggcagtgatgatgtatcgcagcaaggccacgcagaagctaaacaatatcgcttacgcgctgattattggcggcgcgctgggcaacctgttcgaccgcctgtggcacggcttcgttgtcgatatgatcgacttctacgtcggcgactggcacttcgccaccttcaaccttgccgatactgccatctgtgtcggtgcggcactgattgtgctggaaggttttttgccttctagagcgaaaaaacaataataaaccctgccggatgcgatgctgacgcatcttatccggcctacagattgctgcgaaatcgtaggccggataaggcgtttacgccgcatccggcaaaaatccttaaatataagagcaaacctgcatgtctgaatctgtacagagcaatagcgccgtcctggtgcacttcacgctaaaactcgacgatggcaccaccgccgagtctacccgcaacaacggtaaaccggcgctgttccgcctgggtgatgcttctctttctgaagggctggagcaacacctgttggggctgaaagtgggcgataaaaccaccttcagcttggagccagatgcggcgtttggcgtgccgagtccggacctgattcagtacttctcccgccgtgaatttatggatgcaggcgagccagaaattggcgcaatcatgctttttaccgcaatggatggcagtgagatgcctggcgtgatccgcgaaattaacggcgactccattaccgttgatttcaaccatccgctggccgggcagaccgttcattttgatattgaagtgctggaaatcgatccggcactggaggcgtaacatgcagatcctgttggccaacccgcgtggtttttgtgccggggtagaccgcgctatcagcattgttgaaaacgcgctggccatttacggcgcaccgatatatgtccgtcacgaagtggtacataaccgctatgtggtcgatagcttgcgtgagcgtggggctatctttattgagcagattagcgaagtaccggacggcgcgatcctgattttctccgcacacggtgtttctcaggcggtacgtaacgaagcaaaaagtcgcgatttgacggtgtttgatgccacctgtccgctggtgaccaaagtgcatatggaagtcgcccgcgccagtcgccgtggcgaagaatctattctcatcggtcacgccgggcacccggaagtggaagggacaatgggccagtacagtaacccggaagggggaatgtatctggtcgaaagcccggacgatgtgtggaaactgacggtcaaaaacgaagagaagctctcctttatgacccagaccacgctgagcgtggatgacacgtctgatgtgatcgacgcgctgcgtaaacgcttcccgaaaattgtcggtccgcgcaaagatgacatctgctacgccacgactaaccgtcaggaagcggtacgcgccctggcagaacaggcggaagttgtgttggtggtcggtagcaaaaactcctccaactccaaccgtctggcggagctggcccagcgtatgggcaaacgcgcgtttttgattgacgatgcgaaagacatccaggaagagtgggtgaaagaggttaaatgcgtcggcgtgactgcgggcgcaagcgctccggatattctggtgcagaatgtggtggcacgtttgcagcagctgggcggtggtgaagccattccgctggaaggccgtgaagaaaacattgttttcgaagtgccgaaagagctgcgtgtcgatattcgtgaagtcgattaagtcattagcagcctaagttatgcgaaaatgccggtcttgttaccggcattttttatggagaaaacatgcgtttacctatcttcctcgatactgaccccggcattgacgatgccgtcgccattgccgccgcgatttttgcacccgaactcgacctgcaactgatgaccaccgtcgcgggtaatgtcagcgttgagaaaactacccgcaatgccctgcaactgctgcatttctggaatgcggagattccgctcgcccaaggggccgctgtgccactggtacgcgcaccgcgtgatgcggcatctgtgcacggcgaaagcggaatggctggctacgactttgttgagcacaaccgaaagccgctcgggataccggcgtttctggcgattcgggatgccctgatgcgtgcaccagagcctgttaccctggtggccatcggcccgttaaccaatattgcgctgttacttagtcaatgcccggaatgcaagccgtatattcgccgtctggtgatcatgggtggttctgccggacgcggcaactgtacgccaaacgccgagtttaatattgctgccgatccagaagctgctgcctgtgtcttccgcagtggtattgaaatcgtcatgtgcggtttggatgtcaccaatcaggcaatattaactcctgactatctctctacactgccgcagttaaaccgtaccgggaaaatgcttcacgccctgtttagccactaccgtagcggcagtatgcaaagcggcttgcgaatgcacgatctctgcgccatcgcctggctggtgcgcccggacctgttcactctcaaaccctgttttgtggcagtggaaactcagggcgaatttaccagtggcacgacggtggttgatatcgacggttgcctgggcaagccagccaatgtacaggtggcattggatctggatgtgaaaggcttccagcagtgggtggctgaggtgctggctctggcgagctaacctgtcacatgttattggcatgcagtcattcatcgactcatgcctttcactgatatccctccctgtttatcattaatttctaattatcagcgtttttggctggcggcgtagcgatgcgctggttactctgaaaacggtctatgcaaattaacaaaagagaatagctatgcatgatgcaaacatccgcgttgccatcgcgggagccggggggcgtatgggccgccagttgattcaggcggcgctggcattagagggcgtgcagttgggcgctgcgctggagcgtgaaggatcttctttactgggcagcgacgccggtgagctggccggagccgggaaaacaggcgttaccgtgcaaagcagcctcgatgcggtaaaagatgattttgatgtgtttatcgattttacccgtccggaaggtacgctgaaccatctcgctttttgtcgccagcatggcaaagggatggtgatcggcactacggggtttgacgaagccggtaaacaagcaattcgtgacgccgctgccgatattgcgattgtctttgctgccaattttagcgttggcgttaacgtcatgcttaagctgctggagaaagcagccaaagtgatgggtgactacaccgatatcgaaattattgaagcacatcatagacataaagttgatgcgccgagtggcaccgcactggcaatgggagaggcgatcgcccacgcccttgataaagatctgaaagattgcgcggtctacagtcgtgaaggccacaccggtgaacgtgtgcctggcaccattggttttgccaccgtgcgtgcaggtgacatcgttggtgaacataccgcgatgtttgccgatattggcgagcgtctggagatcacccataaggcgtccagccgtatgacatttgctaacggcgcggtaagaagcgctttgtggttgagtggtaaggaaagcggtctttttgatatgcgagatgtacttgatctcaataatttgtaaccacaaaatatttgttatggtgcaaaaataacacatttaatttattgattataaagggctttaatttttggcccttttatttttggtgttatgtttttaaattgtctataagtgccaaaaattacatgttttgtcttctgtttttgttgttttaatgtaaattttgaccatttggtccacttttttctgctcgtttttatttcatgcaatcttcttgctgcgcaagcgttttccagaacaggttagatgatctttttgtcgcttaatgcctgtaaaacatgcatgagccacaaaataatataaaaaatcccgccattaagttgacttttagcgcccatatctccagaatgccgccgtttgccagaaattcgtcggtaagcagatttgcattgatttacgtcatcattgtgaattaatatgcaaataaagtgagtgaatattctctggagggtgttttgattaagagtgcgctattggttctggaagacggaacccagtttcacggtcgggccataggggcaacaggtagcgcggttggggaagtcgttttcaatactagtatgaccggttatcaagaaatcctcactgatccttcctattctcgtcaaatcgttactcttacttatccccatattggcaatgtcggcaccaatgacgccgatgaagaatcttctcaggtacatgcacaaggtctggtgattcgcgacctgccgctgattgccagcaacttccgtaataccgaagacctctcttcttacctgaaacgccataacatcgtggcgattgccgatatcgatacccgtaagctgacgcgtttactgcgcgagaaaggcgcacagaatggctgcattatcgcgggcgataacccggatgcggcgctggcgttagaaaaagcccgcgcgttcccaggtctgaatggcatggatctggcaaaagaagtgaccaccgcagaagcctatagctggacacaagggagctggacgttgaccggtggcctgccagaagcgaaaaaagaagacgagctgccgttccacgtcgtggcttatgattttggtgccaagcgcaacatcctgcggatgctggtggatagaggctgtcgcctgaccatcgttccggcgcaaacttctgcggaagatgtgctgaaaatgaatccagacggcatcttcctctccaacggtcctggcgacccggccccgtgcgattacgccattaccgccatccagaaattcctcgaaaccgatattccggtattcggcatctgtctcggtcatcagctgctggcgctggcgagcggtgcgaagactgtcaaaatgaaatttggtcaccacggcggcaaccatccggttaaagatgtggagaaaaacgtggtaatgatcaccgcccagaaccacggttttgcggtggacgaagcaacattacctgcaaacctgcgtgtcacgcataaatccctgttcgacggtacgttacagggcattcatcgcaccgataaaccggcattcagcttccaggggcaccctgaagccagccctggtccacacgacgccgcgccgttgttcgaccactttatcgagttaattgagcagtaccgtaaaaccgctaagtaatcaggagtaaaagagccatgccaaaacgtacagatataaaaagtatcctgattctgggtgcgggcccgattgttatcggtcaggcgtgtgagtttgactactctggcgcgcaagcgtgtaaagccctgcgtgaagagggttaccgcgtcattctggtgaactccaacccggcgaccatcatgaccgacccggaaatggctgatgcaacctacatcgagccgattcactgggaagttgtacgcaagattattgaaaaagagcgcccggacgcggtgctgccaacgatgggcggtcagacggcgctgaactgcgcgctggagctggaacgtcagggcgtgttggaagagttcggtgtcaccatgattggtgccactgccgatgcgattgataaagcagaagaccgccgtcgtttcgacgtagcgatgaagaaaattggtctggaaaccgcgcgttccggtatcgcacacacgatggaagaagcgctggcggttgccgctgacgtgggcttcccgtgcattattcgcccatcctttaccatgggcggtagcggcggcggtatcgcttataaccgtgaagagtttgaagaaatttgcgcccgcggtctggatctctctccgaccaaagagttgctgattgatgagagcctgatcggctggaaagagtacgagatggaagtggtgcgtgataaaaacgacaactgcatcatcgtctgctctatcgaaaacttcgatgcgatgggcatccacaccggtgactccatcactgtcgcgccagcccaaacgctgaccgacaaagaatatcaaatcatgcgtaacgccagcatggcggtgctgcgtgaaatcggcgttgaaaccggtggttccaacgttcagtttgcggtgaacccgaaaaacggtcgtctgattgttatcgaaatgaacccacgcgtgtcccgttctagcgcgctggcgagcaaagcgaccggtttcccgattgctaaagtggcggcgaaactggcggtgggttacaccctcgacgaactgatgaacgacatcactggcggacgtactccggcctccttcgagccgtccatcgactatgtggttactaaaattcctcgcttcaacttcgaaaaattcgccggtgctaacgaccgtctgaccactcagatgaaaagcgttggcgaagtgatggcgattggtcgcacgcagcaggaatccctgcaaaaagcgctgcgcggcctggaagtcggtgcgactggattcgacccgaaagtgagcctggatgacccggaagcgttaaccaaaatccgtcgcgaactgaaagacgcaggcgcagatcgtatctggtacatcgccgatgcgttccgtgcgggcctgtctgtggacggcgtcttcaacctgaccaacattgaccgctggttcctggtacagattgaagagctggtgcgtctggaagagaaagtggcggaagtgggcatcactggcctgaacgctgacttcctgcgccagctgaaacgcaaaggctttgccgatgcgcgcttggcaaaactggcgggcgtacgcgaagcggaaatccgtaagctgcgtgaccagtatgacctgcacccggtttataagcgcgtggatacctgtgcggcagagttcgccaccgacaccgcttacatgtactccacttatgaagaagagtgcgaagcgaatccgtctaccgaccgtgaaaaaatcatggtgcttggcggcggcccgaaccgtatcggtcagggtatcgaattcgactactgttgcgtacacgccagcctggcgctgcgcgaagacggttacgaaaccattatggttaactgtaacccggaaaccgtctccaccgactacgacacttccgaccgcctctacttcgagccggtaactctggaagatgtgctggaaatcgtgcgtatcgagaagccgaaaggcgttatcgtccagtacggcggtcagaccccgctgaaactggcgcgcgcgctggaagctgctggcgtaccggttatcggcaccagcccggatgctatcgaccgtgcagaagaccgtgaacgcttccagcatgcggttgagcgtctgaaactgaaacaaccggcgaacgccaccgttaccgctattgaaatggcggtagagaaggcgaaagagattggctacccgctggtggtacgtccgtcttacgttctcggcggtcgggcgatggaaatcgtctatgacgaagctgacctgcgtcgctacttccagacggcggtcagcgtgtctaacgatgcgccagtgttgctggaccacttcctcgatgacgcggtagaagttgacgtggatgccatctgcgacggcgaaatggtgctgattggcggcatcatggagcatattgagcaggcgggcgtgcactccggtgactccgcatgttctctgccagcctacaccttaagtcaggaaattcaggatgtgatgcgccagcaggtgcagaaactggccttcgaattgcaggtgcgcggcctgatgaacgtgcagtttgcggtgaaaaacaacgaagtctacctgattgaagttaacccgcgtgcggcgcgtaccgttccgttcgtctccaaagccaccggcgtaccgctggcaaaagtggcggcgcgcgtgatggctggcaaaagcctggctgagcagggcgtaaccaaagaagttatcccgccgtactacagcgtgaaagaagtggtgctgccgttcaataaattcccgggcgttgacccgctgttagggccagaaatgcgctctaccggggaagtcatgggcgtgggccgcaccttcgctgaagcgtttgccaaagcgcagctgggcagcaactccaccatgaagaaacacggtcgtgcgctgctttccgtgcgcgaaggcgataaagaacgcgtggtggacctggcggcaaaactgctgaaacagggcttcgagctggatgcgacccacggcacggcgattgtgctgggcgaagcaggtatcaacccgcgtctggtaaacaaggtgcatgaaggccgtccgcacattcaggaccgtatcaagaatggcgaatatacctacatcatcaacaccaccagtggccgtcgtgcgattgaagactcccgcgtgattcgtcgcagtgcgctgcaatataaagtgcattacgacaccaccctgaacggcggctttgccaccgcgatggcgctgaatgccgatgcgactgaaaaagtaattagcgtgcaggaaatgcacgcacagatcaaataatagcgtgtcatggcagatatttttcatccgctaatttgatcgaataactaatacggttctctgatgaggaccgtttttttttgcccattaagtaaatcttttggggaatcgatatttttgatgacataagcaggatttagctcacacttatcgacggtgaagttgcatactatcgatatatccacaattttaatatggccttgtttaattgcttcaaaacgagtcatagccagacttttaatttgtgaaactggagttcgtatgtgtgaaggatatgttgaaaaaccactctacttgttaatcgccgaatggatgatggctgaaaatcggtgggtgatagcaagagagatctctattcatttcgatattgaacacagcaaggcggttaataccctgacttatattctgagcgaagtcacagaaataagctgcgaagttaagatgatccctaataagctggaagggcggggatgccagtgtcagcgactggttaaagtggtcgatatcgatgagcaaatttacgcgcgcctgcgcaataacagtcgggaaaaattagtcggtgtaagaaagacgccgcgtattcctgccgttccgctcacggaacttaaccgcgagcagaagtggcagatgatgttgagtaagagtatgcgtcgttaattttatctcgttgataccgggcgtcctgcttgccagatgcgatgttgtagcatcttatccagcaaccaggtcgcatccggcaagatcaccgtttaggcgtcacatccgtcgtcccctgcaaacgggggcgattttcctccatttgcctcagtggctgcgtttcatgtaagcttacatgacagcgcccgacaagatcctgatactctttggtattcaaccgtttccagtgtaactcgtcgtcactaacattgcgtacagcgcgggctggcgtacccatcaacaactggcgtttctcgccgcgaaagcccgctttgacaaagctcatggcggcaacaatgctctcttcgccaatgaccgcgccatccataatcacgctgttcatcccgaccaatgcatcgcgaccaatcaaacaaccatgcaggatcgctccgtgcccgatatggccgttttccccaacgatagtgtcagtgtcgcagtagccatgcataatgcagccatcctgaatattggctcccgcttgcacgatcaaccgcccgtagtcaccacgcagactggcgagtgggccgatgtagacaccggctcccacaatcacatcgccaatcaagacggcactgggatggacaaacgccgtcgggtgaaccaccggaattaacccctcaaaggcgtaatagctcacggttgttaacgtcctttccacaccggatcgcgcttctcggcaaacgccagcggcccttcaatggcatcttcgctatgcagaacgcttggatagtgtttcaacacgccgctgcgaatatagcgatacgcttcttctaccggcatttcgctggtggtgcggtagatctctttcagcgccgcaatcgccagcggggcgctgttaaccagctgctgagccagttcgcgggcgttatccatcagttccgcctggctaaccacgcggttgactatcccccaacgcagcgcctcttctgcgcccattcgtctgccggtcatcaccatttcattgacgatggcaggcggcaggatcttcggcagacgcagcacaccgccgctgtcaggaacgatgcccagtttggcttccggcagggcgaagctggcgttatcggcacaaacaataaaatctgccgccagcgccagttcaaagccgccgccaaaggcatagccgttcacagctgcgataaccggtttgtcgagattgaaaatttcggttaatcccgcaaaaccacccggaccaaagtcagcatccggtgcttcgccttctgctgccgcttttaaatcccagcccgcggaaaagaacttctctccggcaccggtaataatggcgacacgtaattgcggatcgtcacggaaatttagaaatacttcgcccatttcaaagctggtttttgcatcaatagcattcgcttttggacgatcaagggtaatttccagaatacttccattgcgggtcagatgtaaactttcactcattccttttctccatttttgctttttcagggagctcaacatccctgcaaaaaatgcatattgttttagagtgtgattattagctggcagggtagttccctgctgtttcatttatttcagattctttctaattattttcccgctgcaattacgtggcagatcttttctgatctccagataagagggcactttaaatttcgccatattttgttcgcagaagcggaaaaattcctcttcgctcaatgtttcaccttcattcagcaccacaaatgctttgatggcttcatcgcgaatgctatctttaatacccacaaccacgatgtcctgaattttcgggtgcgcggcgataatattttccagctccacgcaggagacattctcgccgccacgtttaatcatattgcagcggcgatcgacgaaataaaaaaagtcctcttcgtcgcggtatccggtatcgccggtatgcagccagccatcggcttccagcactttcgcagtggcttgtgggttgagaaagtactctttgaagatggttttcccaggtatgcctttaatgcagatttcaccgatctcaccagccgggagcgggcgattgtgatcgtcgcggatctccgcttcgtagcaaaaccccacccgaccaatgctcggccagcgtcgtttatcgccaggacgatcgccgataatgcccacaatggtttccgtcatcccataagacgtcagcaagcgaacgccgaagcgttcacaaaacgcatctttttcctgctcgctcaagttgagataaaacatcacttcccgcaggcggtgttgctgatcgttcgcactaggcggctgtaccatcaacgtacggatcatcatcggaatacattcggtaacggtggcgcggtacttctgtacctgtccccagaaggcgcgggcgctgtatttctcgaccagcacaaaggtggccccggcagaaaacgccgccatcgccgcagtacactggcaatcgatatgaaacgcaggcattaccgtcaggtagacgtcatcgtcacgcagtgcacactgccaggcggagtaatatccagcgaagcgcaggttgtaatgggtaatcaccacacctttcggtcgggaggtggtgccggaggtgaagagaatttccgccgtatcgtcagtgcttagcggcggtgcatagcacaaggtggcaggttgttgatttttcagttgagtaaagctactcacgccatcatcagcgggaagtgccacatctgtcaggcaaatgtgccgcaattgagtggcatcttcctgctgaatctgttgatacataggatagaattgcgcactggtcaccagcaggcacgcctggctattttgcaggatccacgcgctttcctcgcacaacaggcgggcgttaatcggcaccataatcgcgccaatttttgccagcccgaaccagcaaaagataaattccgggcagttgtcgagatgtagtgcaaccttgtcgcctttgcgaatccccagcgtataaaacaggtttgccgtgcggttaatctcctgatttaactcaagataactataccggttaacgactccgccgctggattcacaaatcagcgccgttttatgaccgtaaacgtccgcaagatcgtcccacatttgacgtagatgttgtccgccaatgatatccattgcacctctatccatttttgttcgtttgttattgggcgggcgctagtcaggcaagccgactgacgccacgcgtttagtcctcaactttggccagacctttgctgaccaactcctgaatgtcgttttcgctgtagccgatatttttcaaaatggcagccgtgtccataccatgactgggcattccgcgccagatttgtccggggttatttttgaatttcggcatgatgttcggccctttgcaggtgcgaccatccatcgtttgccactgagtgatactttcgcgagccacatactgtggattgctttccagttccggtacggtcagcactttggcgcaggcgatattcagttcagcaaagcgttcttttacttccgcgatggtatgtgtcgccagccaggcatcgagtttctcttcaaccagtgggccgtaagggcattcgatacggtggataagctgagtgccttccgggatttctggcgtgccaagcagatgtgcgaggccaatatctttaaagcactcttcaatttgggtaatgcccaccagttccatcacgatgtagccgtcggcacatttatacagaccgcaaccggcgtagtagggatctttacctttgctcatgcgcgggcacatttcgccgccgttgaagtaatccatcatgaagtactggcccatacgcagcatcacttcatacatggcgatgtcgatactttcgcctttaccggtttcacgcactttatgcagtgctgccagcgccgccgtggtggcggtcaggccagaaaagtaatcggcggtatacgggaaggcaggcattggctggtcaacatcaccgttctgaatcaggtaaccactaaaggcctgggcgatagtgttataggccggaagattggtgtactcctcggtgccgtactgaccaaaaccggacaggtgagcgataaccagtttcgggttgtgctgccacagtacttcatcggtaatgccacgacgggcaaaggccggacctttactggcttcgatgaagatatcggtggtttccattaatttcagaaacgcttcgcggccttcatctttgaaaatatttaagctcagcgcgtgcaaattgcggcgggagagttgcgggtagttcggttgaacgcgaatggtgtcggcccaggcgacgttctcgatccagataacttccgcgccccattctgcgaacatttgcccggcaaacggtccggcgatttcgataccggagaagacaacgcgcaatccggccaacggcccgaatttcggcatgggtagatgatccattatttgctcctgaaaaatttatgtagcgcatgactgccggatgcggcgtaaacgctttatccggcctacattcgtgctcccgtaggcctgataagacgcatcagcgtcgcatcaggcagcgcacggacttagcggtattgcttcagcaccgcacgacccagcgtcaggatctgcatttcgtcagatcccccggagacgcggtctacacgcagatcacgccagaagcggctgatgcggtggttgcccgcaatcccgacaccgcccagcacctgcattgcgctatccacaacttcaaatgccgcattggcgcagaagtatttgcacatcgctgcatcgccagaggtgatggtgccgttgtctgctttccacgctgcttcatacagcatgtttttcatggagtttaatttgatcgccatgtgggcgaatttttcctgaatcaactggaaacgaccaatagcctcgccaaactgcacgcgctgattggcgtagcgcgccgcatcttcaaaggcgcacatcgccgtaccgtagttggtgagggctaccaggaaacgttcatggtcgaactcttctttgacgcggttaaagccgttaccttcccgaccgaacatgtctttctcgtccagttccacgtcgtcaaaggtgatttcacagcagctatccatacgcagaccgagcttttcaagtttggtcactttgatgcccggtttgctcatatcaacaaaccattcggtgtagacaggtttgtccggagaagccccgtcgcgcgccatcaccacgatgtacggggtgtaggcgctgctggtaataaaacacttactaccattaagataaatcttaccatttctacgggtataagtcgttttcaggctacccacgtcggagcccgcgcccggttcggtaatcgcactgttccacatctgcttaccggtgccgcggaaagccataattttgtcgatctgctcttgtgtgccttcgcgcaggaaggtgttgaacccgcccggcaactggtacagcacataggttggtgcccccagacgtcccagctccatccacacggcggcgagagtaacaaaccccgcgtccagaccaccgtgctcttcagggatcagcagactgtcgatacccatatccgccagtgctttgacaaaacgttccgggtagacgctgtcacggtcgcactcggcaaaataggcctcccagttttcgctggccatcagttcgcggataccggcgacaaacagttcctgctcatcatttaaattaaaatccatctttcaacctcttgatattttgggggttaattaatctttccagttctgtttcgcgtctttaataaaggagagcgtcaccataatgttgacgaagaacagcgggcatcctccggcgataatggcggtttgaatcggtttcaggccgccgagcgccagcagaacaataccgataatgccaaccagaatactccaaccgatacgcaccagcagaggtggttcttcaccatcgcgtacttcgcggcaagtggacatcgccagggtataagagcaggcgttaaccagcgtaacggtggcaataaagcagaggatgaagaagccccacatggtggcggtgctgagtggcagagcggcccaggtttcaatgatggcgcgcgccacaccgtactgttcgatcagatttggaatgttgatgatgtttttatctatcaacagcagagtgttactaccgagtacagtccacaggatccaggtactcgctgtcagccccagcaccatgccgaagcacagttcacgcacagtacgaccacgggagatgcgggcgaggaagatactcatctggatagcataaatcacccaccatgcccagtagaacacggtccagccctgcgggaagccgcctttagcgatgggatcggtatagaacaacatgcgcggcagatacatcagcaacatccccacgctatcggtgaagtagttcatgatgaagctggcaccgctgacaatgaacacccaacccagcatcaggaagctcaggtaactacgcacgtcactggcgatacgtacccctttttgcagaccgcaagcgacgcaaatggcgttgaggataatccagcaggtaatgatgatagcgtccagttgcagggtatgcggaatgccaaacaaccattgcatacactcggtcaccagcggcgtggcaaggcccagactggtacccatcgcgaagatcaaggcgacgagatagaagttgtcgacgatagtgccgaacaaccctttggcgtgtttttcacctaccagcggcaccagtgtgctgctggggcgaatcacttccattttgcggacaaagaagaagtaagcgaaggcgacactaaggaagctgtaagtggcccacggcagaggtccccagtggaacaagctgtaagccagccccaactctttcgcccctgtgctgttcggttctaagccaaacggcggggtggagatgtagtagtagatctcaatgcttccccagaacagtacggcagcagacgtacaggaggcgaacatcataaagatccaactggcggtgctaaattctggcggttcgttacctaaacgctttttggcatacgggccaaacaccagccagaaccaaccgaaaagcatcaccaccatataccattcaaatgcccatccccatacattggtgacgtaactgaatacagcattaataacgacattcgctgcatccagatctctgactgtaagccaacaaagtatgccgacgattattaacggcggaaagaaaaccttcggttctattcccgtttttctcttttcattcttcatgagttaattccactgtgaaaacgaatatttattttgcgttcccgtttgttttatttttgttaacatttaatataattattattaacctcgtggacgcgttaatggctaactcataatgggtattcaataagctgtattctgtgattggtatcacatttttgtttcgggtgaatagagggcgttttttcgttaattttgattaataatcagtttgttatgctctgttgtgagtaaaaaataacatctgactttcaatattggtgatccataaaacaatattgaaaatttctttttgctacgccgtgttttcaatattggtgaggaacttaacaatattgaaagttggatttatctgcgtgtgacattttcaatattggtgattaaagttttatttcaaaattaaagggcgtgatatctgtaattaacaccaccgatatgaacgacgtttccttcatgatttctggagatgcaatgaagattattacttgctataagtgcgtgcctgatgaacaggatattgcggtcaataatgctgatggtagtttagacttcagcaaagccgatgccaaaataagccaatacgatctcaacgctattgaagcggcttgccagctaaagcaacaggcagcagaggcgcaggtgacagccttaagtgtgggcggtaaagccctgaccaacgccaaagggcgtaaagatgtgctaagccgcggcccggatgaactgattgtggtgattgatgaccagttcgagcaggcactgccgcaacaaacggcgagcgcactggctgcagccgcccagaaagcaggctttgatctgatcctctgtggcgatggttcttccgacctttatgcccagcaggttggtctgctggtgggcgaaatcctcaatattccggcagttaacggcgtcagcaaaattatctccctgacggcagataccctcaccgttgagcgcgaactggaagatgaaaccgaaaccttaagcattccgctgcctgcggttgttgctgtttccactgatatcaactccccacaaattcctagcatgaaagccattctcggcgcggcgaaaaagcccgtccaggtatggagcgcggcggatattggttttaacgcagaggcagcctggagtgaacaacaggttgccgcgccgaaacagcgcgaacgtcagcgcatcgtgattgaaggcgacggcgaagaacagatcgccgcatttgctgaaaatcttcgcaaagtcatttaattacaggggatgctatgaacacgttttctcaagtctgggtattcagcgataccccttctcgtctgccggaactgatgaacggtgcgcaggctttagctaatcaaatcaacacctttgtcctcaatgatgccgacggcgcacaggcaatccagctcggcgctaatcatgtctggaaattaaacggcaaaccggacgatcggatgatcgaagattacgccggtgtcatggctgacactattcgccagcacggcgcagacggcctggtgctgctgccaaacacccgtcgcggcaaattactggcggcaaaactgggttatcgccttaaagcggcggtgtctaacgatgccagcaccgtcagcgtacaggacggtaaagcgacagtgaaacacatggtttacggtggtctggcgattggcgaagaacgcattgccacgccgtatgcggtactgaccatcagcagcggcacgttcgatgcggctcagccagacgcgagtcgcactggcgaaacgcacaccgtggagtggcaggctccggctgtggcgattacccgcacggcaacccaggcgcgccagagcaacagcgtcgatctcgacaaagcccgtctggtggtcagcgtcggtcgcggtattggcagcaaagagaacattgcgctggcagaacagctttgcaaggcgataggtgcggagttggcctgttctcgtccggtggcggaaaacgaaaaatggatggagcacgaacgctatgtcggtatctccaacctgatgctgaaacctgaactgtacctggcggtggggatctccgggcagatccagcacatggttggcgctaacgcgagccaaaccattttcgccatcaataaagataaaaatgcgccgatcttccagtacgcggattacggcattgttggcgacgccgtgaagatccttccggcgctgaccgcagctttagcgcgttgatccactctggcagggctgcattttggccctgccgctgacagggagctcttatgtccgaagatatctttgacgccatcatcgtcggtgcagggcttgccggtagcgttgccgcactggtgctcgcccgcgaaggtgcgcaagtgttagttatcgagcgtggcaattccgcaggtgccaagaacgtcaccggcgggcgtctctatgcccacagtctggaacacattattcctggtttcgccgactccgcccccgtagaacgcctgatcacccatgaaaaactcgcgtttatgacggaaaagagtgcgatgactatggactactgcaatggtgacgaaaccagcccatcccagcgttcttactccgttttgcgcagtaaatttgatgcctggctgatggagcaggccgaagaagcgggcgcgcagttaattaccgggatccgcgtcgataacctcgtacagcgcgatggcaaagtcgtcggtgtagaagccgatggcgatgtgattgaagcgaaaacggtgatccttgctgatggggtgaactccatccttgccgaaaaattggggatggcaaaacgcgtcaaaccgacggatgtggcggttggcgtgaaggaactgatcgagttaccgaagagcgttattgaagaccgttttcagttgcagggtaatcagggggcggcttgcctgtttgcgggaagtcccaccgatggcctgatgggcggcggcttcctttataccaatgaaaacaccctgagcctggggctggtttgtggtttgcatcatctgcatgacgcgaaaaaaagcgtgccgcaaatgctggaagatttcaaacagcatccggccgttgcaccgctgatcgcgggcggcaagctggtggaatattccgctcacgtagtgccggaagcaggcatcaacatgctgccggagttggttggtgacggcgtattgattgccggtgatgccgccggaatgtgtatgaacctcggttttaccattcgcggtatggatctggcgattgccgccggggaagccgcagcaaaaaccgtgcttagtgcgatgaaaagcgacgatttcagtaagcaaaaactggcggaatatcgtcagcatcttgagagtggtccgctgcgcgatatgcgtatgtaccagaaactaccggcgttccttgataacccacgcatgtttagcggctacccggagctggcggtgggtgtggcgcgtgacctgttcaccattgatggcagcgcgccggaactgatgcgcaagaaaatcctccgccacggcaagaaagtgggcttcatcaatctaatcaaggatggcatgaaaggagtgaccgttttatgacttctcccgtcaatgtggacgtcaaactgggcgtcaataaattcaatgtcgatgaagagcatccgcacattgttgtgaaggccgatgctgataaacaggcgctggagctgctggtgaaagcgtgccccgcaggtctgtacaagaagcaggatgacggcagtgtgcgcttcgattacgccggatgtctggagtgcggcacctgtcgcattctggggctggggagcgcgctggaacagtgggaatacccgcgcggcacctttggtgtggagttccgttacggctgatgttggtttgatacgtaacgccgcactgactctcattgcaaaaaacaggaataaccatgcaaccgtccagaaactttgacgatctcaaattctcctctattcaccgccgcattttgctgtggggaagcggtggtccgtttctggatggttatgtactggtaatgattggcgtggcgctggagcaactgacgccggcgctgaaactggacgctgactggattggcttgctgggcgcgggaacgctcgccgggctgttcgttggcacaagcctgtttggttatatttccgataaagtcggacggcgcaaaatgttcctcattgatatcatcgccatcggcgtgataagcgtggcgacgatgtttgttagttcccccgtcgaactgttggtgatgcgggtacttatcggcattgtcatcggtgcagattatcccatcgccaccagtatgatcaccgagttctccagtacccgtcagcgggcgttttccatcagctttattgccgcgatgtggtatgtcggcgcgacctgtgccgatctggtcggctactggctttatgatgtggaaggcggctggcgctggatgctgggtagcgcggcgatcccctgtttgttgattttgattggtcgattcgaactgcctgaatctccccgctggttattacgcaaagggcgagtaaaagagtgcgaagagatgatgatcaaactgtttggcgaaccggtggctttcgatgaagagcagccgcagcaaacccgttttcgcgatctgtttaatcgccgccattttccttttgttctgtttgttgccgccatctggacctgccaggtgatcccaatgttcgccatttacacctttggcccgcaaatcgttggtttgttgggattgggggttggcaaaaacgcggcactagggaatgtggtgattagcctgttctttatgctcggctgtattccgccgatgctgtggttaaacactgccggacggcgtccattgttgattggcagctttgccatgatgacgctggcgctggcggttttggggctaatcccggatatggggatctggctggtagtgatggcctttgcggtgtatgcctttttctctggcgggccgggtaatttgcagtggctctatcctaatgaactcttcccgacagatatccgcgcctctgccgtgggcgtgattatgtccttaagtcgtattggcaccattgttagcacctgggcactaccgatctttatcaataattacggtatcagtaacacgatgctaatgggggcgggtatcagcctgtttggcttgttgatttccgtagcgtttgccccggagactcgagggatgagtctggcgcagaccagcaatatgacgatccgcgggcagagaatggggtaaattgttcagatttctctcttttctgaatcaatattattgactataagccgcgtgaatatatgactacactttgtgggaaaacaaaggcgtaatcacgcgggctacctatgattcttataatttatgcgcatccgtatccgcatcattcccatgcgaataaacggatgcttgaacaggcaaggacgctggaaggcgtcgaaattcgctctctttatcaactctatcctgacttcaatatcgatattgccgccgagcaggaggcgctgtctcgcgccgatctgatcgtctggcagcatccgatgcagtggtacagcattcctccgctcctcaaactttggatcgataaagttttctcccacggctgggcttacggtcatggcggcacggcgctgcatggcaaacatttgctgtgggcggtgacgaccggcggcggggaaagccattttgaaattggtgcgcatccgggctttgatgtgctgagccagccgctacaggcgacggcaatctactgcgggctgaactggctgccaccgtttgccatgcactgcacctttatttgtgacgacgaaaccctcgaagggcaggcgcgtcactataagcaacgtctgctggaatggcaggaggcccatcatggataattaaggaatggcaggaggcccatcatggatagccatacgctgattcaggcgctgatttatctcggtagcgcagcgctgattgtacccattgcggtacgtcttggtctgggaagcgtacttggctacctgatcgccggctgcattattggcccgtgggggctgcgactggtgaccgatgccgaatctattctgcactttgccgagattggggtggtgctgatgctgtttattatcggcctcgaactcgatccacaaaggctgtggaagctgcgtgcggcagtgttcggctgtggcgcattgcagatggtgatttgcggcggcctgctggggctgttctgcatgttacttgggctgcgctggcaggtcgcggaattgatcggcatgacgctggcgctctcctctacggcgattgccatgcaggcgatgaatgaacgcaatctgatggtgacgcaaatgggtcgcagtgcctttgcggtgctgctgttccaggatatcgcggcgatcccgctggtggcgatgattccgctactggcaacgagcagtgccagcacgacgatgggcgcatttgctctcagcgcgttaaaagtggcgggtgcgctggtgctggtggtattgctggggcgctatgtcacgcgtccggcgctgcgttttgtagcccgctctggcttgcgggaagtgtttagtgccgtggcgttattcctcgtgtttggctttggtttgctgctggaagaggtcggcttgagcatggcgatgggcgcgtttctggcgggcgtactgctggcaagcagcgaataccgtcatgcgctggagagcgatatcgaaccatttaaaggtttgctgttggggctgtttttcatcggtgttggcatgagcatagactttggcacgctgcttgaaaacccattgcgcattgtcattttgctgctcggtttcctcatcatcaaaatcgccatgctgtggctgattgcccgaccgttgcaagtgccaaataaacagcgtcgttggtttgcggtgttgttagggcagggcagtgagtttgcctttgtggtatttggcgcggcgcagatggcgaatgtgctggagccggagtgggcgaaaagcctgaccctggcggtggcgctgagcatggcagcaacgccgattctgctggtgatcctcaatcgccttgagcaatcttctactgaggaagcgcgtgaagccgatgagatcgacgaagaacagccgcgcgtgattatcgccggattcggtcgttttgggcagattaccggacgtttactgctctccagcggggtgaaaatggtggtactcgatcacgatccggaccatatcgaaaccttgcgtaaatttggtatgaaagtgttttatggcgatgccacgcggatggatttactggaatctgccggagcggcgaaagcggaagtgctgattaacgccatcgacgatccgcaaaccaacctgcaactgacagagatggtgaaagaacatttcccgcatttgcagattattgcccgcgcccgcgatgtcgaccactacattcgtttgcgtcaggcaggcgttgaaaagccggagcgtgaaaccttcgaaggtgcgctgaaaaccgggcgtctggcactggaaagtttaggtctggggccgtatgaagcgcgagaacgtgccgatgtgttccgccgctttaatattcagatggtggaagagatggcaatggttgagaacgacaccaaagcccgcgcggcggtctataaacgcaccagcgcgatgttaagtgagatcattaccgaggaccgcgaacatctgagtttaattcaacgacatggctggcagggaaccgaagaaggtaaacataccggcaacatggcggatgaaccggaaacgaaacccagttcctaataaagagtgacgtaaatcacactttacagctaactgtttgtttttgtttcattgtaatgcggcgagtccagggagagagcgtggactcgccagcagaatataaaattttcctcaacatcatcctcgcaccagtcgacgacggtttacgctttacgtatagtggcgacaattttttttatcgggaaatctcaatgatcagtctgattgcggcgttagcggtagatcgcgttatcggcatggaaaacgccatgccgtggaacctgcctgccgatctcgcctggtttaaacgcaacaccttaaataaacccgtgattatgggccgccatacctgggaaagtatcggtcgtccgttgccaggacgcaaaaatattatcctcagcagtcaaccgggtacggacgatcgcgtaacgtgggtgaagagcgtggatgaagccatcgcggcgtgtggtgacgtaccagaaatcatggtgattggcggcggtcgcgtttatgaacagttcttgccaaaagcgcaaaaactgtatctgacgcatatcgacgcagaagtggaaggcgacacccatttcccggattacgagccggatgactgggaaagcgtattcagcgaattccacgatgctgatgcgcagaactctcacagctattgctttgagattctggagcggcggtaattttgtatagaatttacggctagcgccggatgcgacgccggtcgcgtcttatccggccttcctatatcaggctgtgtttaagacgccgccgcttcgcccaaatccttatgccggttgctcggctggacaaaatactgtttatcttcccagcgcaggcaggttaatgtaccaccccagcagcagccggtatccagcgcgtatataccttccggcgtacctttgccctccaggcttgcccagtgaccaaaggcgatgctgtattcttcagcgacagggccaggaatcgcaaaccacggtttcagtggggcaggggcctcttccgggctttctttgctgtacatatccagttgaccgttcgggaagcaaaaacgcatacgggtaaaagcgttggtgataaaacgcagtcttcccagcccccgcaattccggactccagttatttggcatatcgccgtacatggcatcaagaaagaagggataggagtcactgcttagcaccgcttctacatcgcgtgcgcactctttggcggtctgcagatcccactgcggcgtgatccctgcgtgggccatcaccagctttttctcttcgtcgatttgcagcagaggctggcgccgcagccagttaagcagctcgtcggcatccggcgcttccagcagcggtgtcaggcgatctttcggtttattgcggctgatcccggcaaataccgccagcagatgcagatcgtgattgcccagcaccagacgtacgctgtcgcctaaggatttcacatagcgcagaacatccaggctacccggcccgcgcgcgaccagatcgcccgtcagccagagggtatctttcccaggggtaaattctactttatgcagcaatgcgatcagttcatcgtaacaaccatgaacgtcgccaataaggtatgtcgccatattcttttaatgaatgagtgtgggaacggcgagtcggaatacgggaatgtcgatgctgaaagggacgccattttcatcgatcatttcgtagtgaccctgcatggtgcccagcggggtttcaatgattgcaccgctggtgtactggtactcttcgccaggcgcgataagtggctggacgccaaccactccttcgccctggacttcggtttcacggccattgccattggtgatcagccagtaacgccccaacaactgcactggcgctcgccccagattgcgtatggttacggtataagcaaaaacgtaacgttcattatcaggactagattgagcctcaatgtagacgctttgaacctgaatacacactcgggggctattgatcatcgttaactctcctgcaaaggcgcgttctccgccagatagttcgccatctggcaatattgcgcgacagagatattttccgctcgcatcgccgggtcgatccccattcccgttaacacctcgacgctaaacaggttgccgaggctgttacgaatggttttacgacgctggttaaaggcttcggtggtgatgcggctcaacacacgaacatctttaaccgggtgaggcatcgttgcatgaggaaccaggcgcacgacggcggaatccactttgggtggtggtgtaaaggcactcggcggtacttccagtaccgggatcacattgcaatagtattgcgccatgacgcttaatcgaccatacgctttgctgttcggtcctgcaaccagacgattcaccacctctttttgcaacataaagtgcatgtcggcaatggcatcagtatagctaaacagatggaacatcaacggcgtggagatgttataaggcaggttgccgaaaacacgcagcggctgacccattttctcggccagttcaccaaagttaaaggtcatcgcatcctgctgataaatcgtcagtttcgggcctaagaatggatgcgtttgcagacgtgccgccagatcgcggtcaagttcgatgaccgtcagctggtccagacgttcgccgaccggttcggtcaatgccgccagaccggggccgatttcgaccatcgcctggcccttttgcgggttaatggcagacacaatactgtcgatcacgaactgatcgttgagaaagttttgcccgaagcgtttacgggctaagtggccctggtggactcgattattcattgggtgttaacaatcattttgatggcgagattaagcgccgtaataaaactgccggcatcggctttgccacgtcccgccagttcaagcgcggtgccgtggtccacacttgtgcgaataaagggcaggcccagcgtaatgttcacaccgcgcccgaagccctggtattttagcacgggaagaccctgatcgtggtacatcgccagcacggcgtcggcgttatcaagatatttcggctgaaacagggtatcggcaggcagcggcccgttgagtttcatcccctgcgcccgcagctcattgagcaccggaataatggtgtctatctcttccgtacccatatgaccgccttcgcccgcgtgcggattcagcccgcagaccagaatgcgcggttcggcaataccaaatttggtccgcaaatcgtgatgcaaaatagcaatcacttcgtgcaaaagtgcaggggtgatagcgtctgcgatatcgcgcagcggtaaatgcgtcgttgccagcgccacgcgaagttcttcggtcgccagcatcatcaccacctttttcgcctggctacgctcttcgaaaaactcggtatgaccggtaaaaggaatgccagcgtcgttaataacgcctttatgcaccggacctgtgatcagcgcggcaaattcgccgttcagacaaccatcgcacgctcgcgccagcgtttccaccacataatgcccattttcaaccgctaactgccccgcagtgacaggtgcacgtagcgcgacaggaagtagcgttaatgtgcccgcagtttgcggttgtgcaggggagttgggggaataagggcggagggtgagcggcaaaccgagcatcgctgcccggttggtaaggagagtggcatcggcacaaacaaccagttcgaccggccactcacgctgtgcaagctggacaactaagtccgggccaatcccggcgggctcgccgggagtgatcacaacacgttgggttttaaccattagttgctcaggattttaacgtaggcgctggcacgttgttcctgcatccagcttgctgcttcttcgctgaacttacggttcatcagcatgcggtatgcacgatctttctgcgcagcgtcggttttatcgacattacgggtatccagcagttcgattaaatgccagccgaaactagagtgaaccggtgcactcatttgacctttgttcaggcgagtcagggcgtcacggaaggccggatcgaaaatatctggtgtagcccagccgagatcgccgccctggttagcagagcctggatcctgagagaactctttcgctgcggcagcaaaagtcgttttaccactcttgatatcagcagcaatctgttccagtttcacacgggcctgttcgtcagtcatgatcgggctcggtttcagcagaatatggcgagcatgaacttcggtcacgctgatatttttgctttcgccgcgcaggtcgttaactttcagaatatggaagccaacgccggaacgaatcgggccaacaatgtcgcctttcttcgcggtgcttaatgcctgggcgaagatcccgggcaactcctgaatacggccccagcccatctggccgccgttcagcgcctgctggtcggcagaatgagcaatcgccagcttaccgaaatcagcgccgttacgcgcctgatcgacaatggcgcgcgcctggctttccgcttcgttcacctgatcagaggtcgggttttccggcagcgggatcaggatgtggctcaggttcagctcagtgctggcgtcgttttggttacccacctgctgcgccagggattcgacttcctgcggcaggatggtgatgcgacgacgcacctcgttgttacgcacttcagagataatcatctctttgcggatctggttacgataggtgttgtagttcagtccatcgtaagccagacggctgcgcatctgatccagcgtcatgttgttctgtttcgcgatgttagcaatcgcctgatccagctgctcatcggagattttcactcccattttctgccccatctgcaggatgatttgatccatgatcaaacgttccatgatttggtggcgcagcgtcgcgtcatcaggaagttgctgccttgcctgagcagcgttcagttttacgctctgcattaatccatcaacgtcgctttccagcacgacgccgttattgacgacggctgcgactttatcgactacctggggggcagcgaaactggtattcgcgatcatggcgataccgagaagcagcgttttccagttcttcatactttttccatttcaattaaccgcactgcggattacgtggtaaatcaacaaatcacaaagtgttttgatacggcagaatgttgctacgcagcatctcttgcgtacccagaccgtagttggagctcaggccgcgaagttcgatgttaaagccgattgcgttgtcatataccgcatgttgtttatcgttatcccaaccgttcagcttccgctcgtaaccgacgcgaattgcatagcagcaggagctgtattgcacacctaacatagagtcggcttgcttgttagcattggtgtcgtagtagtaggccccaacaatggaccaacgatcggcaattggccagctggcgacagcacctacctggctaataccattcttatattgctcagcagtggaatagtacttaggcagcgtagcctgaatatattccgggctggcgtaacggtaattcagctgtaccagacggtcttcatcccgacggtattcaatgctggagttactggtcgctacgttatccagacgtgtatcgtactgaatcccgccacgcaatccccaacgctcggagatacgccagtaagtatcgcctgcccacaccagactacccgttttgtcgtcattctcccatgttatgttgtcatcgccagtgcgagactccgtgaaatagtagatttgaccaacggaaatattaaaacgttcaacggcagcatcatcatatatgcgagatgtgacaccggtcgtcacctggttagcggaggcaatacggtcaagaccgccgtaagtccggtcccggaacaggccagagtagtcagattgcagcagagagctgtcgtagttatagatgtcgctctgatcgcgatacggcacgtacaaatactgcgcgcgcggttccagcgtttgggtataacccggagccagcatttccatatcgcgttcaaagaccattttgccgtcaactttgaattgcggcattacgcggttaacggattcgtccagcttggtcgtgtttctggagttataccagtcaagattggtttgctgataatgggttgccagcaacttcgcttcggtattgatgctgccccagttattagagagcggcaaattgatggtcggttccaggtgaacacgggttgcttcaggcatgtcgtctctggtgttaacaaagtgcactgcctggccgtaaatacgcgtatcaaacggaccaacatcattctggtagtaattaacgtctaactgcggctctgcgctgtagctactggtgttctgttcgctgaaaacctggaactgcttggtactaacggtggcattgaagttttgcaccgcatagccaacgctgaatttttgcgttgcgtagccgtcagtactggaaccgtacttgttatcgaaatcattgaagtagctaggatcgctgaccttggtgtagtcgacgttgaaacgccacacctgatccatgaccccggagtggttccagtagaataaccaacgacgactactgtcatcgttcgggtgttcatcttcatagactttatcactaggcagatagtccagttccatcaagccagcgcccgcctgggagaggtagcggaattcgttctcccacatgatgttgccacgacgatgcatataatgcggcgtgatggtggcatccatatttggcgcgatgttccagtaatatggcaggtagaactcaaagtagttggtggtggtgtacttggcgttcgggatcaagaaaccagagcgacgtttgtcacccaccggcaactgcaaataggggctataaaagatcggtaccggacccaccttaaagcgggcgttccagatctccgcaacttgttcttcgcggtcatgaataatttcgctacctaccacgctccaggtgtcagaacccggcagacaggaggtaaagctaccgttatccagaatggtatagcggttttcgccacgttgtttcatcaggtccgctttaccgcgaccctggcgacccaccatctggtaatcaccttcccagacgttggtatctttggtgttcagattcgcccagcctttcggccctttgaggatcacctggttatcgtcgtaatggacattaccgagcgcatcaacggtacgtaccggctccggttgtcctggtgcctctttttgatggagctgcacttcgtcggcctgcagacggctgttaccctgcatgatatccacgctgccagtaaacacggcgtcatccgggtagtcccctttcgcgtggtcagcattgatagtcacgggtaagtcattggtatcgccctgtaccagaggacggtcatagcttggcacgcccaacatgcactgactggcgaggtcggctgccagtccctgttgactataaagggcggtggcaatcatggtggccaggagagtggggatacgttttttcatacgttgattttattgttccatcatcggtaacgttgcgcgtgacaaacggtcagagactaacgtactcgtcatctctacgctagtgttaatcctgtccgaatagcgtcagtggtgttaggcacggcattgaatgacaggtatgataatgcaaattataggcgatgtcccacaattgaccgcagccggaaaacggtaaaagcacctttatattgtgggagatagccctgatatccgtgtgtcgatttggggaatatatgcagtattggggaaaaatcattggcgtggccgtggccttactgatgggcggcggcttttggggcgtagtgttaggcctgttaattggccatatgtttgataaagcccgtagccgtaaaatggcgtggttcgccaaccagcgtgagcgtcaggcgctgttttttgccaccacttttgaagtgatggggcatttaaccaaatccaaaggtcgcgtcacggaggctgatattcatatcgccagccagttgatggaccgaatgaatcttcatggcgcttcccgtactgcggcgcaaaatgcgttccgggtgggaaaaagtgacaattacccgctgcgcgaaaagatgcgccagtttcgcagtgtctgctttggtcgttttgacttaattcgtatgtttctggagatccagattcaggcggcgtttgctgatggtagtctgcacccgaatgaacgggcggtgctgtatgtcattgcagaagaattagggatctcccgcgctcagtttgaccagtttttgcgcatgatgcagggcggtgcacagtttggcggcggttatcagcagcaaactggcggtggtaactggcagcaagcgcagcgtggcccaacgctggaagatgcctgtaatgtgctgggcgtgaagccgacggatgatgcgaccaccatcaaacgtgcctaccgtaagctgatgagtgaacaccatcccgataagctggtggcgaaaggtttgccgcctgagatgatggagatggcgaagcagaaagcgcaggaaattcagcaggcatatgagctgataaagcagcagaaagggtttaaatgaccctgtaaatgatgctgagtaactgcccacgattaaaggtggccgccctggcggtcacttctttgagaaaaggcgtttactcagaatggtggacaggctcaatgcacgatttacgggaggggttctgtaggttttatcgcgttgaccctgcttaaggttgagagctttacgacgagcggaattatatttttacgtcttaaaaataaaaaacacatacctgaatgagcgatttttgaaagtatatttattcagaacgcgcatcatgagtttttaactcaatgcgaggctattaccatgaaagtaagtgttccaggcatgccggttacacttttaaatatgagcaagaacgatatttataagatggtgagcggggacaagatggacgtgaagatgaatatctttcaacgcttgtgggagacgttacgccatctgttctggagtgataaacagactgaggcttataaacttctgttcaatttcgtgaataaccagactggcaacatcaacgccagtgaatactttactggggctatcaacgagaatgagagagaaaagtttatcaatagcctggaattattcaataaacttaaaacatgcgcaaaaaatccggatgagttggtcgcaaagggcaatatgcgctgggtcgcccagaccttcggggatatcgagttaagtgtcacttttttcattgaaaagaataagatatgtactcagacgttgcagctgcataagggccaaggtaacttgggcgttgatcttagaaaggcttaccttcccggcgttgacatgagggattgttaccttggtaaaaaaacaatgaaaggtagcaatgatatcctttatgagagacctgggtggaatgctaacctgggcgtgctaccccggacggtgctaccccggacggtgctaacccggacggtgctaacctggacggtgctaccgtgaacggtgctacctccttatatgatgaggtaattattattaataaaatcccccccaaaaaaattgatactaaaggagttgctactgaagaagttgctactaaaaaagtactgctgaacaaattactgacaacgcaattattgaatgagccagaataagctaaggttgaaggggctggaacgccccttcaaccttagcagtagcgtgggatgatttcacaattagaaagacctgcatgatgagctagagaagaggctagtgacgcaaggcgtcgtgcaggacacggatcaccgagatgggcatcgccaaccagactgctaattagcccatgaataacaatcagaaaggaccataacagacccgttaaaatgaaatataagagacggtcaacgggtgaagaaaaagttcaaaaattcgctgtggagcaggaagggaattaccgaatggaaagcgtagccacacgcaacaactgaaagcagtttggcagaaacaaaaaatccccggactcggggatttatgtacaagaggcagcccttaggatgagggtataaacgtacaggaaaggttaaaaatccgctggcgctttaaacgtcatactattgccatacgccggatgggtaatcgtcaacatctctgcatgtagcaacaaacgtggtgccatcgctctcgcttctggacttgcataaaaacgatcgccgagaatcggatgacccagcgccagcatatgcacacgcaattgatggctacgcccggtaatcggttttaacaccactcttgccgtgttatccgccgcatactccaccacttcatattccgtctgcgcaggtttacccgtttcgtaacagactttctgtttcgggcggtttggccagtcgcaaatcagcggcagatccaccagaccttctgcgggggatggatgcccccagacgcgggccacatactgctttttcggctcgcgctcgcggaactggcgttttaactcccgctccgcggctttggtcagcgccactacaatcacgccgctggtagccatatccagacgatgcacgctttctgcctgcggataatcacgctgaatgcgcgtcatcacgctgtctttgtgctcttccagacgacccggcacactcaacaaaccgctcggcttgttgaccaccataatatggtcatcctgatacaggataaccaaccagggttcctgcggtggattgtagttttccatccccattttcggctccgttactgatgcgttacaacgatcaaacgcagggcatccagacgccaacctgcctgatccaggctttccattacctgctgacggttgctctcaatggcggtcagttcgtcgtcacgaatgttcgggttcactgcacgcagagcttccagacgagacagctcggcagacagtttttcgtcggcttcgttacgcgctgcatcaatcaatgcacgggcagatttctcgatctgcgcttcacccagttgaaggatagcgtgaacatcctgctgcacggcgttaaccagtttgctgccggtgtgacggttaaccgcgttaagctggcggttaaaggtttcaaactctacctgcgccgccaggttgttgccgtttttatccagcagcatacgtaccggcgtcggtggcaggaagcggttgagctgcaactgcttcggagcctgggcttcaaccacataaatcagttccaccaacagcgtacctaccggcaacgctttgttttttaacagactaatcgtgctgctaccggtatcgccagaaaggatcagatccagaccgttgcggatcagcggatgctcccaggtaataaactgtgcatcttcacgcgccagcgccacttcacgatcaaaggtgatggtgatgccatcttcgctcaggccagggaagtccggcaccagcatatgatcggacggcgtcagcacgatcatgttgtcgccgcgatcgtcctgattgataccgataatatcgaacaggttcatggcgaaggcgatcaggttggtatcgtcatcctgctcttcaatgctttctgccagtgcctgggctttttcgccaccgttggagtggatttccagcaggcggtcacgaccctgttccagctgtgctttcagcgcttcatgttgctcgcggcagtttttgatcagatcgtcaaagccttcggtttgatccggactagccagatagttaatcagatcgttgtatacgctatcgtaaatagtgcgtccggtcgggcaggtgtgctcaaatgcatccagaccttcgtgataccagcgcaccagcacgctctgagcggttttctccagataaggcacatggatctgaatatcgtgcgcctggccgatacgatccagacgaccaatacgctgctccagtagatccgggttgaatggcaggtcaaacatcaccatgtggctggcgaactggaagttacgtccttcagaaccgatttcactgcacagcagtacctgtgcgccggtgtcttcttcggcaaaccaggcggcagcgcggtcacgttcgataatgctcataccttcgtggaacaccgcagcgcgaataccttcacgttcgcgcagtacctgctccagttgcagcgcagtggcagctttggcgcagatcaccagcactttctgagagcgatggctggtcaggtagcccatcagccactcaacgcgcggatcgaagttccaccaggtggcgttatcaccttcaaattcctgataaatacgctccgggtagagcatatcgcgagcacgatcttccgcacttttacgtgcgcccataatgccggagactttaatagccgtctgatactgcgtcggtagcggcagcttaatggtgtgcagctcgcgtttcgggaatcctttcacaccgttacgcgtgttacggaacagcacgcggctggtgccgtggcgatccatcagcatgctaaccagctcctgacgggcgctctgggcatcttcgctgtcgctgtttgctgcctgcaacagcggctcgatatcctgctcgccgatcatctcgccgagcatgttcagttcgtcattgctcagtttgttacctgccagcagcatggcaacggcgtccgcaaccggacgataatttttctgctcttcaacgaactgcgcaaaatcgtggaaacggttcgggtccagcagacgcagacgggcgaagtggctttccatccccagctgttccggggtcgcggtcagcagcagaacgcccggcacgtgctctgccagttgttcaatggcctgatattcacggcttggcgcatcttcgctccacaccaggtgatgcgcttcatcgaccaccagcaggtcccattcggcttcacagagatgttccaggcgctgtttgctacgacgggcaaaatccaggctgcaaatcaccagctgttcggtgtcaaacgggttgtaagcatcgtgctgagcttcggcataacgctcatcatcaaatagcgcaaagcgcaggttgaaacggcgcagcatttctaccagccactgatgctgtaaggtttccgggacgataattagcacacgttcagcagcgccagagagcagttgctgatgcaggatcatcccggcttcaatggttttccctaaacccacttcgtcagccagcaggacgcgcggcgcgtggcggcgaccaacatcatgagcgatgttgagctgatgcgggatcaggctggtacgctgaccgcgcaggccgctgtacggcatacggaactgttcgctggaatatttacgcgcgcgataacgcagcgcaaagcggtccatacggtcaatctgcccggcaaacagacggtcctgcggtttgctgaacaccagtttgctatcaaggaaaacttcacgcagggctacgccggactcttcagtatccaggcgagtaccgatataggtcagcaagccattttcttcttttacttcttcgacttgcatctgccagccgtcatggctggtaatggtatcaccagggttgaacatcacgcgggtcacgggggaatcactgcgtgcgtacagacggttttcaccagtagatgggaaaagtaaagtgacagttcgcgcatccaccgcgacaacggttccaagtcccaattcgctttctgtatcgctgatccagcgttgaccaagtgtaaaaggcatatgtgttcggctctatatctttaattgcaggcaataaccacccgctaccgtgcttatgaggtagtggtgttattcaggtccaggaatggaaagggcgctatggtactggatggcaaagcattcgtcacgcatcaaaatggtatctggcgaactcttttttttgctcaaaatagcccaagttgcccggtcataagtgtagcaaaattatcctcaataaaagggagtattccctccgccacgggttgtagctggcgggtcagatagtgttcgtaatccagtggactacgttggtagtccagcggctccgggccgttggtggtccatacgtacttaatggtgccgcgattctgatattgcaaggggcgaccacgcttttggttttcttcatcggcaaggcgagcggcgcgtacatgaggcggcacattacgctgatactcgctcagcggacggcgaaggcgtttacggtaaaccagtcgcgcatccagttcacccgccatcagtttgtcgatggtttcgcgtacatattcctgatatggctcgttgcggaagatgcgcaggtatagctcctgctgaaactgctgggccagcggcgtccagtcggtgcgcacggtttccagccctttaaacaccatccgctgcttgtcgccctcctgaatcagtccggcataacgctttttactgccggtatcggctccgcgaatggttggcatcagaaaacggcagaaatgggtttcatactccagttctaatgcgctggtcagccgttgtttttgcagcgtttccgcccaccaggcgttaacgtgctgcaccagtgcacgaccgattttcgccgcttcttcttcgctatgtgcgcctttcagccagacaaacgtactgtcggtatcgccgtagataacgtcgtagccctgtgcttcaatcaacgctttggtttgccgcatgatctgatgaccacgcatggtgatgctgcttgccagccgcggatcgaagaagcggcaggcggtggtgccgagcacgccataaaaggcattcatgatgattttcagcgcctggctcagcggtttgttaccctggcgtttggcttcatcgcgcccgtgccagatgttagtcacaatctccggcaggcaatgtttttctcggctgaaccaggcatcgagaaaaccttcggtactgtgctctggatcaggctgcgccatgccttccaccagcccgacgggatcaatcagaaaggtgcggatgatgctcgggtacaggcttttatagtccagcaccagcacactatcataaagccctggccgactatccatcacgtagccgccagggctggcgtgcggcggcacttcgccgagattaggcgcgacataaccagcgcgatgcattcgcggaaaatagagatgaccaaatgccgccacgctaccgccgtgtcggtccaccggcaggccgttcaccgttgcccgttcgagtaaaaatggcatgatttcagttttgtggaagatctgcgtcaccagctcgcaatctttcaggttataagttgccagcgcaggtttatcttcggcgaaacggcggtcaatttcgtccattcgatcccacgggttatcgatagattttccttcgcctaatagctcctgagcgacagtttccaggctgaaactagagaaattccagaacgcggatttcagcgcctcgataccgtcgataattagccgacctttagcctgggcaaaaaagacgccgtttttaaagccgtgctcgcgccactccagctcgctattatcgcgcccaagacgcagcggaagacggtaacgctcggcatgtttttgcagcattcgcagatcgaactgcaccacgttccaaccgatgatcacatcaggatcgtagttggcaaaccaggcgttgagtttttccagcaactgcgggcggctggcgacgtattccagttcgaaatcaaggctggaggcgtcgccattctccggccccagcatataaacgatgcgctgcccgcagccttccaggccgatgcagtacagctcaccgtggcgggtggtttcaatatctatagaaacccacttgagcggcggacgatagtcgggatgcggtttcagacgggcattaacgatagtgccattgtgcatatcaccctcgacccacaccggactggtgataaaccgctccatcagatagcgttctggcggacgcacatcggcctcgtagacggtaacgccaccttcacgcaggcgcttttcgtaattcatcaattggcgatgggcgcgacagtaaaggccatacaccggctggcggtgaaaatcctttaacgccagcggtgtcaggcgaaagccttgttcaccctgcaaaatatgctgagcgcggggaacctgatcggcgggaataaacgccacggactcttgcggtgcaagcgtaacctgcaacggcccgttgtccgtcgccagccagaaggagacttctgtcccttgcggggtgtcccgccagtgtcgggttaagataaaacctgcctgcgccacgctgaaaatccatcaaaaaaccaggcttgagtatagcctggtttcgtttgattggctgtggttttatacagtcattactgcccgtaatatgccttcgcgccatgcttacgcagatagtgtttatccagcagcgtttgctgcatatccggtaactgcggcgctaactgacggcagaatatccccatataagcgacctcttccagcacgatggcgttatgcaccgcatcttcggcatttttgccccatgcaaacgggccgtgggaatggaccagaacgccgggcatttgcgctgcatcgataccctgtttttcaaaggtttctacgatgacgttaccggtttcccactcatattcgccgttgatttctgcgtcggtcattttgcgggtgcagggaatggtgccgtagaaatagtcggcgtgggtggtgccggttgctggaatgctctgacccgcctgcgcccagatggtggcgtggcggctgtgcgtatgcacaatgccgccaatggaggggaatgcctgatagagcagccggtgagttggcgtgtcggaggagggctttttcgtaccttcaaccacttcaccggtttcgatgctaaccacgaccatatcgtcagcggtcatgacgctgtaatcgacgccggaaggtttgatcacaaagacgccgcgctcgcgatcaacggcgctgacgttgccccatgtgagcgtgaccaggttgtgttttggcagcgccaggttggcttctaatacctggcgtttgagatcttctaacatgttgactccttcgtgccggatgcgctttgcttatccggcctacaaaatcgcagcgtgtaggcctgataagacgcgccagcgtcgcatcaggcgttgaatgccggatgcgctttgcttatccggcctacaaaatcgcagcgcgtaggcctgataagacgcgccagcgtcgcatcaggcgttgaatgccggatgcgctttgcttatccggcctacaaaatcgcagcgtgtaggccagataagacgcgtcagcgtcgcatcaggcgttacataccggatgcggctacttagcgacgaaacccgtaatacacttcgttccagcgcagcgcgtctttaaacgctggcaggcgtgtgtcgttatcaatcaccgtgatttcaatgtcgtgcatctcggcgaattggcgcatatcgttgaggttcagtgcatggctgaagacggtatggtgcgcgccaccagcgaggatccacgcttcggaagcagttggcagatccggttgcgctttccacagcgcattcgccaccggcagtttcggcagggagtgcggtgttttcaccgtgtcgatgcagttaaccagtagacggtaacgatcgccgagatcaatcaagctggcgacaatcgctgggccggtttgggtattgaagatcaggcgggcaggatcgtccttaccaccaataccgagatgctgaacgtcgaggatcggtttctcttctgcggcgatgctcgggcagacttccagcatatgggagccgagcaccaggtcattacctttctcgaagtgataggtgtagtcctccataaaggaggtgccgccctgcagaccggtactcatcaccttcatgatgcgaagcagggcggcagttttccagtcgccttcgcccgcaaagccgtaaccctgctgcatcagacgctgtacggccagaccaggaagctgtttcagaccgtgcaaatcttcaaaggtggtggtgaacgcgtggaagccaccttgttccaggaaacgcttcatccccagctcaatacgcgccgcttccagcacgttctgtcgttttttgccgtggatttgtgtggcaggcgtcatggtgtagcagctttcgtactcatcgaccagcgcgttaacatcgccgtcgctgatggagttcaccacctgcaccagatcgccaaccgcccaggtattgacggagaaaccgaacttgatctgtgcggcaactttatcgccatcggtgaccgccacttcacgcatgttatcgccaaatcggcagactttcagatgacgggtatcctgtttagagaccgcctgacgcatccaggagccgatacgctcatgggcttgtttatcctgccagtgaccggtaaccacggcatgttgctgacgcatacgcgcgccaatgaagccgaactcgcgaccgccatgtgcagtctggttcaggttcataaagtccatatcgatactgtcccacggcagcgccgcgttgaactgggtgtggaattgcagcaacggtttgttgagcatggtcaggccgttgatccacattttggccggggagaaggtgtgcagccacaccaccagaccagcgcaacgatcgtcgtaattcgcgtcgcggcaaatagcggtgatttcatccggcgtggtgcccagcggtttcaacaccagtttgcagggcagtttcgcttccgtattcagcgcattaacgacgtgctcggcatgttgggtgacctgacgcagggtttccgggccatacagatgctggctgccaatgacaaaccacacttcataattatcaaaaatcgtcattatcgtgtccttatagagtcgcaacggcctgggcagcctgtgccggggcggaagttggaagatagtgttgttcggcgctcatcgcccattgctgatagcggcgataaagctgttcaaagcgttgtgcctgctcgctgcacggttgcagggttttctctaccgcactggccattttttgctgagcacttgggatgtctgcgtgcactttcgcggcgacggcagcaaaaatcgccgcaccgagcgcacagcactggtcagaggcaacaatttgcagcgggcgattcagcacgtcgcagcaggcctgcataatgacctggtttttccgcgcgatgccgcccagtgccatcacgttattaacggcgatcccctgatcggtaaagcactccatgattgcgcgtgcgccaaaggcggtggcagcaatcaaaccgccgaacagcagcggagcgtcggtagcgaggttaagatcggtaatcacccctttcaggcgttggttagcgttcggtgtgcggcggccgttaaaccagtcgagcaccaccggcaggtgatccagagacggatttttggcccatgcttcggtcagcgccggaagcagttgtttctggctggcgttgatttgcgttttcagttccggatgctgggcggcaagctgttccagcggccagccgagtacgcgaccaaaccaggcgtagatatcaccaaacgcgctttggcctgcttccagaccgataaatccaggcaccacgctgccatcaacctgaccgcaaatacctttaactgcccgctcgccaacgctctgtttgtcggcaatcagaatgtcgcaggtggaagtaccgataacttttaccagtgcgttaggctgtgcgcctgcgccaactgcgcccatatggcagtcaaacgcgccgccggaaatcaccacgctttcaggcaggccgagacgctgcgcccattccgggcataaggtgcccaccggaatatcggcagtccaagtgtcagtgaacagcggggaaggcaaatggcgattgaggatcgggtccagctcatcaaagaaactggctggcggcaggccgccccagctttcgtgccacagagatttatgcccggcgctgcaacgtccgcgacgaatatcctgcgggcgggtggtaccggaaagcagagctggcacccagtcgcacagctcaatccagcttgcggcagattgcgccacggcgctgtcctggcgagtcacatgcaggatttttgcccagaaccattcgctggaataaataccaccaatgtagcgggagtagtcaacgttgcccggcgcgtggcacaaacgggtaatctcttccgcttcttcaaccgcagtgtggtctttccacaatacgaacatcgcgttcgggttttcggcaaactccgggcgcagcgccagcacgtttccgtcggcatcaatcggtgcgggcgtgctgccggtactgtcaacgccaatcccgaccacagctgcgcgctgttcgacgctaagctctgcaagcacggttttcagtgccgcttccatactctcaatgtagtcacgcggatgatgacggaactggttattcggggcatcacaaaattgccctttctgccaacggggataccactctacgctggtggcgatctcttcaccggtagcgcagtccaccgccaaagctcgcacagaatcactgccaaaatcgaggccaattgcaatcgccatcgtttcactccatccaaaaaaacgggtatggagaaacagtagagagttgcgataaaaagcgtcaggtaggatccgctaatcttatggataaaaatgctatggcatagcaaagtgtgacgccgtgcaaataatcaatgtggacttttctgccgtgattatagacacttttgttacgcgtttttgtcatggctttggtcccgctttgttacagaatgcttttaataagcggggttaccggttgggttagcgagaagagccagtaaaagacgcagtgacggcaatgtctgatgcaatatggacaattggtttcttctctgaatggtgggagtatgaaaagtatggctgaagcgcaaaatgatcccctgctgccgggatacagctttaacgcccatctggtggcgggtttaacgccgattgaggccaacggttatctcgatttttttatcgaccgaccgctgggaatgaaaggttatattctcaatctcaccattcgcggtcagggggtggtgaaaaatcagggacgagaatttgtctgccgaccgggtgatattttgctgttcccgccaggagagattcatcactacggtcgtcatccggaggctcgcgaatggtatcaccagtgggtttactttcgtccgcgcgcctactggcatgaatggcttaactggccgagtatatttgccaatacgggtttctttcgcccggatgaagcgcaccagccgcatttcagcgacctgtttgggcaaatcattaacgccgggcaaggggaagggcgctatagcgagctgctggcgataaatctgcttgagcaattgttactgcggcgcatggaagcgattaacgagagcctccatccaccgatggataatcgggtacgcgaggcttgtcagtacatcagcgatcacctggcagacagcaattttgatatcgccagcgtcgcacagcatgtttgcttgagcccgagccgtctgagtcatcttttccgccagcagttagggattagcgtcttaagctggcgcgaggaccaacgcattagtcaggcgaagctgcttttgagcactacccggatgcctatcgccaccgtcggtcgcaatgttggttttgacgatcaactctatttcagccgagtatttaaaaaatgcaccggggccagcccgagcgagtttcgtgccggttgtgaagaaaaagtgaatgatgtagccgtcaagttgagttaattggtaacgaatcagacaattgacggcttgacggagtagcatagggtttgcagaatccctgcttcgtccatttgacaggcacattatgcaagcattgctggaacactttattacccaatccaccgtgtatagtttgatggcggtggtgttggtggcctttctggagagcctggcgctggtcggtttgattctacccggtacggtgctgatggcggggctgggagcgctgattggcagcggcgagttaagtttctggcacgcctggctggcagggattattggctgcttgatgggcgactggatttctttctggctgggttggcgttttaaaaagccgttgcatcgctggagttttctgaagaaaaacaaagcactacttgataaaactgaacatgcgttgcatcaacacagcatgttcaccattctggtcggtcgttttgttggcccgacgcgtccgctggtgccaatggtggcgggaatgctggatctgccggtggctaaatttattacgccgaatattatcggctgcctgctgtggccgccgttttacttcctgccagggattctggcgggcgcggcgatcgatattcctgccggaatgcagagcggtgagtttaaatggttgctgctggcaacagcggtgtttttgtgggttggtggctggctgtgctggcggttatggcgcagcggtaaagcgactgaccgtttgagtcattatttgtcccgcggtcgtttgttgtggctgacgccgttgatttctgccatcggcgtggtggcgctggtggtgttaattcgccacccgttgatgccggtgtatatcgatattttgcgtaaagtggttggggtttaagagatagtcttgtgcgggttgcctgatgcgacgcttgccgcgtcttatcaggcctacaaaacgcactacccgtaggtcggataaggcgttcacgccgcatccgacagtgcatattaacccgtaatccccaatagtgcgctagcactcgccttaccgctcaacaactcattggtcataccctgccaggcgatgcgcccgtcggcgactactacgctgcgcgtggcgatccgcgccgcatcttccacgctgtggctcaccatcaatagcgtcattttttgctgctggcagctcgtgctcaccagcgtcaacatctcctgacgtaacgccggatcgagcgcagagaacggttcatcgagcaataaaatcggctgttcgcgtaccagacaacgcgctaacgccactcgctgtcgctgaccgccggaaagctcgcccggtaaccgcgccattaaattatcaatccccatctggcgggcgatagcgtgcattttcccctgctgtaccgcgttcagtttcaatcccggatttagccccagcccgatgttctgtgcgaccgtcaggtggctgaacaggttgttctcctgaaacagcatgctcaccggacggcgactcggcggcatagttgtgtgatctacgccatcgatagtcaggctaccgctggctggcgtcagaaaaccggcgatcaaattcagcagggtacttttacccgcgccgcttggcccgaggatcgccacctgctcgccgcgttccaccgttaagctaaaacgcatcggcaaatggtggtaaagccaggtgatatcagtcagttttaacatttcgccccggtagtttttcaatcacggtaaacagcagaaaacagagcagcagcagaattaacgcggtgaccgcaccgtcctggctgcgataggagccaatttgctggtagagataaaacggcagggtgcggaaatcatcgttaccgaacaacgccaccacgccaaaatcaccaatgctcagcacgcatgcaaaggccagcgcctgcgccagtggacgtttcagggcgcgcagctccaccacttttaagcgactccagccttcaatccccaggctctgacataacatgctgtagcgggcggtgatatcgcgcatcgggttttccagcactttcagcgcataagggatcgccattaacgcattggtgaaaatcacaatgccgtcagcagattgtggcaggccgatagtgttgttgagcagtaaaaagaagccggtagccagcacaatccccggcatggcgaggatcaacatgccgctcatctccagcacctgacccgccagcattttctgccgcgcccgcagttcgcgactgctccatagcagcatcatggtcagcactacgcacaatacacctgccgccagcgcaatacgcaagctggtccacagcgcctgccacagcaccggttgtgccagcacttccggcaactggcgatttaccccatcgacgatcaccgccagtaacggtggcagcaacagcagcagcgccagcacaattaacaccgtgtcgcaaatgcggctatgcagacgatcgtccgggtcgcgccagccttgcagcagcgtggtgccgggcgcaatggccttactcaatcgctgactcaacagcaccagcccgaggcagcacaccatctggagcagcgccagcattgccgcgcgggcaggatcgtagtcgtaactcagcgcctgatagattgccagctcgatagtggtcgcctgcggaccgccccccaggcttagcacggtggcgaagctggcgaaacagagcataaagataagcgcagcaaccggcgggatttgtcgccgtaaccacggccattcgacgaagcggaaaaaatgccagctacgcatcccaagctgggcggcaagttgacgctgttcgccggggatgttttccagtgcctggagtaataagcggctcgccatcggcagattaaaaaacacatgggccagcaaaataccttgcaggccgtaggggctaaaggtccactccagaccgaggctttggcagagtgttgccagccagccctggcgaccatagacgctaagaatgccgaaaacagcgaccaacaccgggaggatcaaggtcattgcacacagacgcaacagcgccagccgacccggaaagcgcctgcgatagagcgcgcgggcgaggaatatcgcgggtatgacagagagcagtgcgctgagaaacgcctgccagaaggagaagcgcaccacatgccacagatagctgtcctgccagactgccacccagtcatcctgcggcgcgttccaccacagggcgagaaacgccgccagcgcaaccgctaccaccagcgtggtggcgcttacacctggaattaaccagccgggaattaacggctgacggcgcgttgccattcgctaatccatgcctgacgttgtgccgccacttcggctggcgtgaactccaacgtggttgcgggtttggtcaatttttcaaaaccggcaggcagcgtgacgtttgccaccggatacatccagttgccggttgggatcgcattctggaaagccggagaaaccataaactggaggaatttttgcgccagctccggctgcttgctggcagcggtgcgggcggcgacttccacttgcagatagtgaccttcgctgaagttcgcggcggcgtagttatctttcttctcttcgagaatgtgataagccggagaggtggtgtaactcagtaccagatcgctttcaccttttaaaaacaggccgtaggcttcgctccagcctttggtgaccgtgaccgttttcttcgccagtttctgccaggcttgtggggcgtcatcgccatagactttttgcatccatagcaacagacccagccccggtgtactggtgcgcggatcctgataaatcacccgccagttttgatcgctctcaaccagttctttcaggctttgtggcgggtttttcagtttgttcttgtcataaacgaaggcgaagtagccataatcaaacggtacgaaagtgtcattattccagccgccgggaacgttaacggcatccgctgccacaccgcttttggcaaacagtccggttttactggcggcgtctaacaggttgttatccagccccagcaccacatcggctttactgtttttgccttccatccgtagacggttgagaaggctaacgccatcttccagcgccaccagtttcagttcgcaattacagtcggcttcaaaggcttttttaaccaccggaccaggcccccagtcggcggcgaaggaatcgtaggtataaacagtcagaacgggtttagcgaaaacgggcgctgtgcacagcaacagcaggggcagacatttttttaacactttgcacctcaaaaaagagtggcaaaggacttgagaaggagcctcaaatcccttcgccggcgttatccggatcaggttcgacgggtattttctcagcgcacgcgtacgcgtggcaccccgttgagaacggcgttagtgtagtgattttgttatcaaccagcaatcatggatccggtggcgcaaaccacgcacttttaaaatcgaaccagccgagggtattcatgcgcaggccgcgcatactgcgttgcccctgaatgatcagccagtggtgcaataatggcaccatcgctttgctggcgaccagttgctggcaccagttcgccagattcatctcgccattgcgccagcgagcagcgtcggcttgccagtcaatgggaatgcaatgttgtagcagtggcacttcgcataaatgtgcgaaaacagagaagtccagcggcagggtaaagttggcgctgtttagccagatatcactttcgatctctcctgtatgccactgatcgtagtcgatctctttgattttcagcgtgacctggtgacttgccagaatctgctgcatgatcccggcaatcacccgatgctcactgtgatcctgataaaaggttagggtgaggctttccaggccagccggtttttcgctctttatggtgcgggcatggtgccaacgggggagcagtccataagccgggaaccacagttgctggtactgttcctcagcgaaatagaccagattagttggagaaagcacatagcttacccagtccctgacttgctgattcgccccgcgatgggtgcggctgtcgaacagtaaatagtagcaaccttcctccaggcggctttcaatctctttttcctcgccctgtggaccttttagcatcagccctccggctggctcgtcggcaatttccggcagaacccagacgttaacttcgtcgattaatgcccggtaaccgaagaagtcatcgaatgcctgaattttcagttgattggtgctgttgcgaatcaccgcatacggaccggtgccgatgggatggctggcaaagttactgagggtttcccattcgcgcggcaggatcatcgccggaacttgccccagcagtaacggtaaccagcggtccggttgcgtgagatggatatccagcgtccagggcgtcgggctcacaatgtcagcaatatggctatagagcggcagcgtattgattcgttttaaagaggcgatcacatcgtccatttccagttcacgaccatggtgaaaatggactcctggacgcaaaaagaaacgccagtgaagcggactaatttgctgccagtggtgggcgatgtctgcttccagttccccattttcctcatttatgcgcgttaggctactgaagatttgccgggcgatatgggtttcggaacggcgcaatgcgctgccaggtagcagattacgcaacggacgatagtagagcacgcgcaggatgtgccgcccctggcggaagctgcggcccagatgagaaaccagcatttgccgcacagtcgctttgtcgccaaccaactgcaccagttgatcgatacgatcctgctccagcaggtcttccgcccgctgttgctgaagcgccagcccggtatagaggaatgtcagacggctgcgtttaccgcgcccgacttccgcttcccacgtcagccagccgcgatcctgcatggtgttgagcagggtgcgcatatgacgacggctgcagctcaataacgctgccagttcgttgagcgttgtgtcctggcttttaccctcgcagcattgccacaggcggatgaactgttgttgcagacgagcagatggcataaaaggggaactcctgtgcaaaagacagcaattttattttccctatattaagtcaataattcctaacgatgaagcaagggggtgccccatgcgtcagttttatcagcactattttaccgcgacagcgaagttgtgctggttgcgttggttaagcgtcccacaacgattaaccatgcttgaaggactgatgcagtgggatgaccgcaattctgaaagttgacttgcctgcatcatgtgtgactgagtattggtgtaaaatcacccgccagcagattatacctgctggttttttttattctcgccgcgctaaaaagggaacgtatgatctggataatgacgatggctcgccgtatgaacggtgtttacgcggcatttatgctggtcgcttttatgatgggggtggccggggcgctacaggctcctacattgagcttatttctgagtcgtgaggttggcgcgcaacctttctggatcggcctcttttatacggtgaatgctattgctgggatcggcgtaagcctctggttggcaaaacgttctgacagtcagggcgatcggcgaaaactgattatattttgctgtttgatggctatcggcaatgcgctattgtttgcatttaatcgtcattatctgacgcttatcacctgtggtgtgcttctggcatctctggccaatacggcaatgccacagttatttgctctggcgcgggaatatgcggataacagcgcgcgagaagtggtgatgtttagcagcgtgatgcgtgcgcagctttctctggcatgggttatcggtccaccgttggcctttatgctggcgttgaattacggctttacggtgatgtttagcattgccgccgggatattcacactcagtctggtattgattgcatttatgcttccgtctgtggcgcgggtagaactgccgagcgaaaatgctttaagtatgcaaggtggctggcaggatagtaacgtacggatgttatttgtcgccagcacgttaatgtggacctgcaacaccatgtacattattgatatgccgttgtggatcagtagcgagttaggattgccagacaaactggcgggtttcctgatggggacggcagctggactggaaataccagcaatgattctggctggctactatgtcaaacgttatggtaagcggcgaatgatggtcatagcagtggcggcaggagtactgttttacaccggattgattttctttaatagccgtatggcgttgatgacgctgcaactttttaacgctgtatttatcggcattgttgcgggtattgggatgctatggtttcaggatttaatgcctggaagagcgggggcagctaccaccttatttactaacagtatttctaccggggtaattctggctggcgttattcagggagcaattgcacaaagttgggggcactttgctgtctactgggtaattgcggttatttctgttgtcgcattatttttaaccgcaaaggttaaagacgtttgatgacgtggacgatagcggaaagcccggtcatttgaccgggcaaggggattaattcataaacgcaggttgttttgcttcataagcggcaatggcgtcgtcgtgctgcaaggtaagcccaatactgtccagaccgttcatcatgcagtggcggcggaaggcatcgatggtaaagcgataggttttctctcccgctttcacctcttgcgcttccagatccacgtcgaaatggatccccggattagctttcaccagcgcaaacagttcgtccacttctgcatcgcttaatttcaccggcagcagctggttgttaaagctattgccgtagaagatgtcagcaaaactcggcgcaatcaccactttaaaaccgtagtcggtcaatgcccagggcgcgtgctcacggctagagccacagccgaagttttctcgtgccagcaaaatggaagcgccctgatactgcgggaagttcagcacgaagtccgggtttggctgttggcctttttcatccagaaaacgccagtcgttaaacagatgcgcgccaaaacccgtacgggtcactttctgcaaaaactgtttcgggatgattgcatcggtatcgacattggcggcatccagcggaaccaccaggcctgtgtgtttgataaatttctctgccatggtgtgctccttatttaatgttgcgaatgtcggcgaaatgtccggtcacagcagcagcggcagccattgccgggctgaccagatgcgtgcgcccgccgcgcccctggcggccttcaaagttacggttgctggtggaggcacaacgttcgcccggattcagacggtcgttgttcatcgccagacacatactgcagccaggcaagcgccattcaaaaccggcttcaataaagattttatccagaccttccgcttccgcctgggcttttaccgggccagagccgggaaccaccagtgcctgcacgcctggcgcgacttttcgccctttggcgatctccgctgccgcgcgtaaatcttcaatgcggctgttggtacaggaaccgataaacactttgtcgatagccacttcggtcagcggaatacccggtttcagccccatataggccagcgctttttctgcgctcgcgcgttcaaccggatcggcaaagctagccggatcgggaatattgtcgttcacggaaatcacctggccgggattggtgccccaggtgacctgcggactaatttcttctgcttgcagagtgacaacggtatcgaaagttgcgccttcgtcggtttgcagggttttccagtaggcaacggcgtcgtcgaaatctttgcctttcggcgcatgcagacggcctttgacatagttaaaggtggtttcgtccggtgcaaccagaccggcttttgcgcccatttcgattgccatattgcacagggtcatacgaccttccatgcttaaatcacggattgcttcgccgcaaaactccaccacatgcccggtgccgcctgcgctaccggttttaccgataattgccagcacgatatcttttgcggtaatgcccggcgcggctttgccctggacttcaattttcatggtttttgcgcggccctgtttcagggtttgcgttgccagtacgtgttcaacttcggaagtgccgataccaaaggccagtgcgccaaacgcgccgtgggtggcggtatggctgtcgccgcagacaatggtcatccccggcaaggtgacgccctgttccggccccattacgtggacgatcccctgatacgggtgattcaggtcatacagttcgacgccaaattctttgcagtttttgatcagttcctgcatctggatacgcgccatttcaccgcaggcattaatgtctttggtctgggtagagacgttgtgatccatggtagcgaaggttttgcccggctgacgtaccgggcgaccgtgggcgcgcagaccatcgaacgcctgcggactggtcacttcatgcaccaggtggcggtcgatatataacagtggggtttcgttttcggcttcgtacacaacgtgagcgtcgaacaatttttcgtataacgtcttagccatgattacaccccttctgctacatagcgggcaatgatatcgcccatttcatcggtactaacggcggcagcgccacgggctaaatccccggtgcgaatgccttcttctaatgcgcggttaatggcgcgttcaatggcgcaagccgcatcatcggcatccaggctgtaacgcagcagcagtgccaggctaaggatttgtgcaatcgggttggcgatgtttttgcctgcgatatctggtgcgctgccgcccgccggttcatacagtccaaaaccttgctcgttcaggctggcggaaggcaacatccccatgctgccagtgatcattgcgcactcgtcagacagaatgtcgccaaacaggttggagcacagcagaacgtcaaactgacttggatctttaatcagctgcatggtggcgttgtcgatgtacatatgcgccagttcgacatccgggtattccgtggcgatctcgttaacgatctcccgccataaaatagaggattgcagcacgttggctttatcgatgctcgtcactttgtggcgacgcttgcgagcagattcaaacgcgatgcgggcgatacgttcgatctcaaaacggtgatacacctcggtatcaaaggctttttcatattgtccgctaccttcgcggccttttggctgaccgaaatagatgccgccggtcagttcgcgcacacacaggatgtcgaagccgtttgcggcaatgtctgcacgcagcggacagaatgcttccagcccctgatacagttttgccgggcgcaggttgctgaataatttgaagtgcttacgcagaggcagcagcgcgccgcgttctggttgctggtctggtggtaaatgttcccacttcgggccgcctacgctgccaaacagcacggcatcggcttgctcacaaccttcaaccgtcgcaggcggcagtggttgcccgtggttatcaatggctgcgccgcctacatcgtaatggctggtggtgatgcgcatcgcaaagcggttgcgcacggcatccagcactttcagcgcctgggtcatcacttccggaccaataccgtcccccggcaatacggcaatatggtaattcttgctcatcacacggtttccttgttgttttcgttgtgttgagctttgcgttgcaactctttttcgacttctgcggcacgccagatattgttcagaacgtgcaccatggctttggcagaactctcgacaatatcggtagccaggccgacgccgtggaagcggcgaccgttgtagttagcgacgatatccacctgacccagcgcatctttaccgtggcctttggcggtcaggctgtatttcaccagttcgacgttatattcagtgatgcggttaattgcctgatagacggcatcgaccggaccgttaccgttggcggcttctgctttgacttcttcgccacaggccagtttgacggcggcggtggcgatatcgttagagccagactgcacgctgaagtaatccagacggaaatgctccggctcttcttgctgcttaccgatgaaggccagcgcctccagatcgtaatcaaacacctgaccttttttgtccgccagcttcaggaaagcatcgtacaaattgtctaaattatattcactttctttataccccatctcatccatgcgatgtttcaccgccgcacgcccgctacgagaggtcagattcagctggatttggttcagaccaatagattctggtgtcatgatttcgtagttttcgcggtttttcagcacgccatcctggtgtataccggaggagtgtgcgaatgcgccgctgccaacaatggctttgtttgccgggatcggcatattacaaatctggctaactaactggctggtgcgccatatctcctggtgattaatggcggtgtggacgttgagaatatccttacgaactttgatcgccatgatgacttcttccagggaacagtttccggcacgctcgccgatcccgttcattgcgccttccacctggcgtgcaccggcatgtaccgccgccagactgtttccgaccgccaggcccaaatcgtcgtgggtatgtacggagataatggctttgtcgatgttaggcacgcgttcatacaggccgctgatgattccggcgaactcaaacggcatggtgtagcccacggtgtccggaatgttgatggtggtggcaccggcattaatcgccgcttcgaccactcgcgccagatcggcaatgggtgtacgcccggcatcttcgcaagaaaattcaacatcatcggtgtaattacgggcgcgtttcaccatatagatagcgcgttcgatcacctcgtccagcgtgctgcgcagcttggtggcgatgtgcattgggctagtggcaataaaggtatgaatacggaaggcttcggcgactttcagggattcggccgccacgtcgatatctttttccacgcagcgagctaacgcacatacgcggctgtttttaacctggcgggcgatggtttgcacgctttcaaaatcgcccgggctagagacggggaaaccgacttccatcacgtcaacacccatacgctcaagggccagcgcaatttgcagtttttctttcacactcaagcttgcctgtaacgcctgttcaccgtcgcgcaatgtggtatcgaaaataatgacttgctggctcatggtttgggtccttgtctcttttagagcgcctcgcttcgggcataaaaaaacccgcgcaatggcgcgggttttttgtttgactgcgtgctggcttaatgctggatgccgctcactcgtctaccgcgcaaagaagatgcgtttagtagtagtagaccgataaagcgaacgatgtgagtcattaaatcagctccagatgaatgcgatatgcttttagagttactggatacaaaaacggatgtcaaccctgacgcaataaaaacgtcccgccagcgtgagttctgcatccgtaaaattagctaattgtgctgcggtggttaaagtaagcgatattaatttctgcttaactaccgacgcttttcatcggttgacatatttcagcataaatttttgcatctaatcaacgaggaaaaaggggacaaaatgcacgcgttgcaaaacctatcctgatgatttgtattgaattatatgttttgcgattttttttgatattgatttggtgaatattattgatcaattaatgttaagaattaatgcattaaatatataaattaattattaaataagcacatttaatccattttgtagatgattgagtattcgcggtagttatgattagattgttttcgcaacaaaaacattatggattattatgctgtggtaaatgactcattccacggcaatggattctgtttttatcagaacccgtatctttatgttttccgaattttactcattttgctttttcttattttatatgcatgataaatcatattcttcaggattatttctctgcattccaataagggaaagggagttaagtgtgacagtggagttaagtatgccagaggtacaaacagatcatccagagacggcggagttaagcaaaccacagctacgcatggtcgatctcaacttattaaccgttttcgatgccgtgatgcaggagcaaaacattactcgtgccgctcatgttctgggaatgagccaacctgcggtcagtaacgctgttgcacgcctgaaggtgatgtttaatgacgagctttttgttcgttatggccgtggtattcaaccgactgctcgcgcatttcaactttttggtagtgttcgtcaggcattgcaactagtacaaaatgaattgcctggtagtggttttgaacccgcgagcagtgaacgtgtatttcatctttgtgtttgcagcccgttagacagcattctgaccagccagatttataatcacattgagcagattgcgccaaatatacatgttatgttcaagtctagtttaaatcagaacactgaacatcagctgcgttatcaggaaacggagtttgtgattagttatgaagacttccatcgtcctgaatttaccagcgtaccattatttaaagatgaaatggtgctggtagccagcaaaaatcatccaacaattaagggcccgttactgaaacatgatgtttataacgaacaacatgcggcggttagcctcgatcgtttcgcgagttttagtcaaccttggtatgacacggtagataagcaagccagtatcgcgtatcagggcatggcaatgatgagcgtacttagcgtggtgagccaaacgcatttggtcgctattgcgccgcgttggctggctgaagagttcgctgaatccttagaattacaggtattaccgctgccgttaaaacaaaacagcagaacctgttatctctcctggcatgaagctgccgggcgcgataaaggccatcagtggatggaagagcaattagtcagtatttgcaaacgctaactgattgcagaataggtcagacatgaatgtctggtttattctgcattttttattgaatgtagaattttattctgaatgtgtgggctctctattttaggattaattaaaaaaatagagaaattgctgtaagttgtgggattcagccgatttattatcaatttaatcctctgtaatggaggattttatcgtttcttttcacctttcctcctgtttattcttattaccccgtgtttatgtctctggctgccaattgcttaagcaagatcggacggttaatgtgttttacacattttttccgtcaaacagtgaggcaggccatggagatgttgtctggagccgagatggtcgtccgaagccttatcgatcagggcgttaaacaagtattcggttatcccggaggcgcagtccttgatatttatgatgcattgcataccgtgggtggtattgatcatgtattagttcgtcatgagcaggcggcggtgcatatggccgatggcctggcgcgcgcgaccggggaagtcggcgtcgtgctggtaacgagcggtccaggggcgaccaatgcgattactggcatcgccaccgcttatatggattccattccattagttgtcctttccgggcaggtagcgaccagcttgataggttacgatgcctttcaggagtgcgacatggtggggattagccgaccggtggttaaacacagttttctggttaagcaaacggaagacattccgcaggtgctgaaaaaggctttctggctggcggcaagtggtcgcccaggaccagtagtcgttgatttaccgaaagatattcttaatccggcgaacaaattaccctatgtctggccggagagcgtcagtatgcgttcttacaatcccactactaccggacataaagggcaaattaagcgtgctctgcaaacgctggtagcggcaaaaaaaccggttgtctacgtaggcggtggggcaatcacggcgggctgccatcagcagttgaaagaaacggtggaggcgttgaatctgcccgttgtttgcagtttgatggggctgggggcgtttccggcaacgcatcgtcaggcactgggcatgctgggaatgcacggtacctacgaagccaatatgacgatgcataacgcggatgtgattttcgccgtcggggtacgatttgatgaccgaacgacgaacaatctggcaaagtactgcccaaatgccactgttctgcatatcgatattgatcctacttccatttctaaaaccgtgactgcggatatcccgattgtgggggatgctcgccaggtcctcgaacaaatgcttgaactcttgagccaagaatccgcccatcaaccactggatgagatccgcgactggtggcagcaaattgaacagtggcgcgctcgtcagtgcctgaaatatgacactcacagtgaaaagattaaaccgcaggcggtgatcgagactctttggcggttgacgaagggagacgcttacgtgacgtccgatgtcgggcagcaccagatgtttgctgcactttattatccattcgacaaaccgcgtcgctggatcaattccggtggcctcggcacgatgggttttggtttacctgcggcactgggcgtcaaaatggcgttgccagaagaaaccgtggtttgcgtcactggcgacggcagtattcagatgaacatccaggaactgtctaccgcgttgcaatacgagttgcccgtactggtggtgaatctcaataaccgctatctggggatggtgaagcagtggcaggacatgatctattccggccgtcatagtcaatcttatatgcaaagcctacccgatttcgtccgtctggcggaagcctatgggcatgtcgggatccagatttctcatccgcatgagctggaaagcaaacttagcgaggcgctggaacaggtgcgcaataatcgcctggtgtttgttgatgttaccgtcgatggcagcgagcacgtctacccgatgcagattcgcgggggcggaatggatgaaatgtggttaagcaaaacggagagaacctgattatgcgccggatattaagtgtcttactcgaaaatgaaagtggcgcgttatcccgcgtgattggccttttttcccagcgtggctacaacattgaaagcctgaccgttgcgccaaccgacgatccgacattaagccgtatgaccatccagaccgtgggcgatgaaaaagtacttgagcagatcgaaaagcaattacacaaactggtcgatgtcttgcgcgtgagtgagttggggcagggcgcgcatgttgagcgggaaatcatgctggtgaaaattcaggccagcggttacgggcgtgacgaagtgaaacgtaatacggaaatattccgtgggcaaattatcgatgtcacacccagcctttataccgttcaattagcaggcaccagcggtaagcttgatgcatttttagcaagcattcgcgatgtggcgaaaattgtggaggttgctcgctctggtgtggtcggacttagccgcggcgataaaataatgcgttgagaatgatctcaatgcgcaatttacagcccaacatgtcacgttgggctttttttgcgaaatcagtgggaacctggaataaaagcagttgccgcagttaattttctgcgcttagatgttaatgaatttaacccataccagtacaatggctatggtttttacattttacgcaaggggcaattgtgaaactggatgaaatcgctcggctggcgggagtgagccggaccactgcaagctatgttattaacggcaaagcgaagcaataccgtgtgagcgacaaaaccgttgaaaaagtcatggctgtggtgcgtgagcacaattaccacccgaacgccgtggcagctgggcttcgtgctggacgcacacgttctattggtcttgtgatccccgatctggagaacaccagctatacccgcatcgctaactatcttgaacgccaggcgcggcaacggggttatcaactgctgattgcctgcagtgaagatcagccagacaacgaaatgcggtgcattgagcaccttttacagcgtcaggttgatgccattattgttagcacgagcttgcctcctgagcatcctttttatcaacgctgggctaacgacccgttcccgattgtcgcgctggaccgcgccctcgatcgtgaacacttcaccagcgtggttggtgccgatcaggatgatgccgaaatgctggcggaagagttacgtaagtttcccgccgagacggtgctttatcttggtgcgctaccggagctttctgtcagcttcctgcgtgaacaaggtttccgtactgcctggaaagatgatccgcgcgaagtgcatttcctgtatgccaacagctatgagcgggaggcggctgcccagttattcgaaaaatggctggaaacgcatccgatgccgcaggcgctgttcacaacgagctttgcgttgttgcaaggagtgatggatgtcacgctgcgtcgcgacggcaaactgccttctgacctggcaattgccacctttggcgataacgaactgctcgacttcttacagtgtccggtgctggcagtggctcaacgtcaccgcgatgtcgcagagcgtgtgctggagattgtcctggcaagcctggacgaaccgcgtaagccaaaacctggtttaacgcgcattaaacgtaatctctatcgccgcggcgtgctcagccgtagctaagccgcgaacaaaaatacgcgccaggtgaatttccctctggcgcgtagagtacgggactggacatcaatatgcttaaagtaaataagactattcctgactattattgataaatgcttttaaacccgcccgttaattaactcaccagctgaaattcacaataattaagtgatatcgacagcgcgtttttgcattattttgttacatgcggcgatgaattgccgatttaacaaacacttttctttgcttttgcgcaaacccgctggcatcaagcgccacacagacgtaacaaggactgttaaccggggaagatatgtcctaaaatgccgctcgcgtcgcaaactgacactttatatttgctgtggaaaatagtgagtcattttaaaacggtgatgacgatgagggattttttcttacagctattcataacgttaatttgcttcgcacgttggacgtaaaataaacaacgctgatattagccgtaaacatcgggttttttacctcggtatgccttgtgactggcttgacaagcttttcctcagctccgtaaactcctttcagtgggaaattgtggggcaaagtgggaataaggggtgaggctggcatgttccggggagcaacgttagtcaatctcgacagcaaagggcgcttaagtgtgcctacccgttatcgggaacagctgcttgagaacgctgccggtcaaatggtttgcaccattgacatttatcacccgtgcctgctgctttaccccctgcctgaatgggaaattatcgagcaaaaattaagccgtctgagcagcatgaacccggttgagcgccgtgtgcagcgcctactgttaggtcatgccagcgaatgtcagatggatggcgcaggtcgattgttaatcgcgccagtactgcggcaacatgccgggctgacaaaagaagtgatgctggttggacagttcaacaagtttgagctgtgggatgaaacaacctggcatcaacaggtcaaggaagatatcgacgcagagcagttggctaccggagacttaagcgagcgactgcaggacttgtctctataaaatgatggaaaactataaacatactacggtgctgctggatgaagccgttaatggcctcaatatccgtcctgatggcatctacattgatgggacttttggtcgcggtggtcacagtcgtctgatcctcagccagcttggcgaagaggggcgtttgctggcgatcgatcgcgacccgcaggctatcgccgttgcgaagactattgatgatccgcgcttctccatcatccacggacctttctccgcgctgggcgaatacgttgccgagcgcgatcttatcggcaagatcgacggcattctcctcgatcttggcgtctctagtccgcaacttgatgatgctgaacgtggcttttcctttatgcgcgatggtccgctggacatgcgtatggacccaacccgtgggcagagtgccgctgaatggctacaaaccgcagaagaagccgatatcgcctgggtattgaaaacctatggtgaagagcgttttgccaaacgcattgcccgcgccattgtcgagcgtaaccgcgaacagccgatgacccgcaccaaagaactggcggaagtcgtggctgctgcaacgccggtgaaagataagtttaaacatcccgcgacccgtaccttccaggcggtgcgcatttgggtaaacagtgaactggaggagatagagcaggcgctaaaaagcagcctcaacgtgctggccccgggtgggcggcttagcatcatcagcttccacagcctggaagaccgtattgtgaaacgttttatgcgtgaaaacagccgcggtccgcaagttccggcagggttaccgatgactgaagagcagctcaaaaaactgggtggccgtcagctgcgagcactaggcaagttaatgccgggcgaagaagaggtggctgagaaccctcgtgcccgtagtagtgttctgcgtattgcagagaggacgaatgcatgatcagcagagtgacagaagctctaagcaaagttaaaggaagcatgggaagccacgagcgccatgcattgcctggtgttatcggtgacgatcttttgcgatttgggaagctgccactctgcctgttcatttgcattattttgacggcggtgactgtggtaaccacggcgcaccatacccgtttactgaccgctcagcgcgaacaactggtgctggagcgagatgctttagacattgaatggcgcaacctgatccttgaagagaatgcgctcggcgaccatagccgggtggaaaggatcgccacggaaaagctgcaaatgcagcatgttgatccgagtcaagaaaatatcgtagtgcaaaaataaggataaacgcgacgcatgaaagcagcggcgaaaacgcagaaaccaaaacgtcaggaagaacatgccaactttatcagttggcgttttgcgttgttatgcggctgtattctcctggcgctggcttttctgctcggacgcgtagcgtggttacaagttatctccccggatatgctggtgaaagagggcgacatgcgttctcttcgcgttcagcaagtttccacctcccgcggcatgattactgaccgttctggtcgcccgttagcggtgagcgtgccggtaaaagcgatttgggctgacccgaaagaagtgcatgacgctggcggtatcagcgtcggtgaccgctggaaggcgctggctaacgcgctcaatattccgctggatcagcttagtgcccgcattaacgccaacccgaaagggcgctttatttatctggcgcgtcaggtgaaccctgacatggcggactacatcaaaaaactgaaactgccggggattcatctgcgtgaagagtctcgccgttactatccgtccggcgaagtgactgctcacctcatcggctttactaacgtcgatagtcaagggattgagggcgttgagaagagtttcgataaatggcttaccgggcagccgggtgagcgcattgtgcgtaaagaccgctatggtcgcgtaattgaagatatttcttctactgacagccaggcagcgcacaacctggcgctgagtattgatgaacgcctgcaggcgctggtttatcgcgaactgaacaacgcggtggcctttaacaaggctgaatctggtagcgccgtgctggtggatgtcaacaccggtgaagtgctggcgatggctaacagcccgagttacaaccctaacaatctgagcggcacgccgaaagaggcgatgcgtaaccgtaccatcaccgacgtgtttgaaccgggcagtacggttaaaccgatggtggtaatgaccgcgttgcaacgtggcgtggtgcgggaaaacagcgtactcaataccattccttatcgaattaacggccacgaaatcaaagacgtggcacgctacagcgaattaaccctgaccggggtattacagaagagcagtaacgtcggtgtttccaagctggcgttagcgatgccgtccagtgcgttagtagatacttacagtcgttttggactgggaaaagcgaccaatttggggttggtcggagaacgcagtggcttatatcctcaaaaacaacggtggtctgacatagagagggccaccttctctttcggctacgggctaatggtaacaccattacagttagcgcgagtctacgcaactatcggcagctacggcatttatcgcccactgagcattaccaaagttgaccccccggttcccggtgaacgtgtcttcccggaatccattgtccgcactgtggtgcatatgatggaaagcgtggcgctaccaggcggcggcggcgtgaaggcggcgattaaaggctatcgtatcgccattaaaaccggtaccgcgaaaaaggtcgggccggacggtcgctacatcaataaatatattgcttataccgcaggcgttgcgcctgcgagtcagccgcgcttcgcgctggttgttgttatcaacgatccgcaggcgggtaaatactacggcggcgccgtttccgcgccggtctttggtgccatcatgggcggcgtattgcgtaccatgaacatcgagccggatgcgctgacaacgggcgataaaaatgaatttgtgattaatcaaggcgaggggacaggtggcagaagctaaagcctgagcgcttcgcgctggttgttgttatcaacgatccgcaggcgggtaaatactacggcggcgccgtttccgcgccggtctttggtgccatcatgggcggcgtattgcgtaccatgaacatcgagccggatgcgctgacaacgggcgataaaaatgaatttgtgattaatcaaggcgaggggacaggtggcagatcgtaatttgcgcgaccttcttgctccgtgggtgccagacgcacctagccgagcactgcgagagatgacactcgacagccgtgtggctgcggcgggcgatctctttgtagctgtagtaggtcatcaggcggacgggcgtcgatatatcccgcaggcgatagcgcaaggtgtggctgccattattgcagaggcgaaagatgaggcgaccgatggtgaaatccgtgaaatgcacggcgtaccggtcatctatctcagccagctcaacgagcgtttatctgcactggcgggccgcttttaccatgaaccctctgacaatttacgtctcgtgggcgtaacgggcaccaacggcaaaaccacgactacccagctgttggcgcagtggagccaactgcttggcgaaatcagcgcggtaatgggcaccgttggtaacggcctgctggggaaagtgatcccgacagaaaatacaaccggtagcgcagtcgatgttcagcatgagctggcggggctggtggatcagggcgcgacgttttgcgcaatggaagtttcctcccacgggctggtacagcaccgtgtggcggcattgaaatttgcggcgagcgtctttaccaacttaagccgcgatcaccttgattatcatggtgatatggaacactacgaagccgcgaaatggctgctttattctgagcatcattgcggtcaggcgattattaacgccgacgatgaagtgggccgccgctggctggcaaaactgccggacgcggttgcggtaagtatggaagatcatattaatccgaactgtcacggacgctggttgaaagcgaccgaagtgaactatcacgacagcggtgcgacgattcgctttagcagtagttggggcgatggcgaaattgaaagccatctgatgggcgcttttaacgtcagcaacctgctgctcgcgctggcgacactgttggcactcggctatccactggctgatctgctgaaaaccgccgcgcgtctgcaaccggtttgcggacgtatggaagtgttcactgcgccaggcaaaccgacggtggtggtggattacgcgcatacgccggatgcactggaaaaagccttacaggcggcgcgtctgcactgtgcgggcaagctgtggtgtgtctttggctgtggtggcgatcgcgataaaggtaagcgtccactgatgggcgcaattgccgaagagtttgctgacgtggcggtggtgacggacgataacccgcgtaccgaagaaccgcgtgccatcatcaacgatattctggcgggaatgttagatgccggacatgccaaagtgatggaaggccgtgctgaagcggtgacttgcgccgttatgcaggctaaagagaatgatgtggtactggtcgcgggcaaaggccatgaagattaccagattgttggcaatcagcgtctggactactccgatcgcgtcacggtggcgcgtctgctgggggtgattgcatgattagcgtaacccttagccaacttaccgacattctcaacggtgaactgcaaggtgcagatatcacccttgatgctgtaaccactgatacccgaaaactgacgccgggctgcctgtttgttgccctgaaaggcgaacgttttgatgcccacgattttgccgaccaggcgaaagctggcggcgcaggcgcactactggttagccgtccgctggacatcgacctgccgcagttaatcgtcaaggatacgcgtctggcgtttggtgaactggctgcatgggttcgccagcaagttccggcgcgcgtggttgctctgacggggtcctccggcaaaacctccgttaaagagatgacggcggcgattttaagccagtgcggcaacacgctttatacggcaggcaatctcaacaacgacatcggtgtaccgatgacgctgttgcgcttaacgccggaatacgattacgcagttattgaacttggcgcgaaccatcagggcgaaatagcctggactgtgagtctgactcgcccggaagctgcgctggtcaacaacctggcagcggcgcatctggaaggttttggcagccttgcgggtgtcgcgaaagcgaaaggtgaaatctttagcggcctgccggaaaacggtatcgccattatgaacgccgacaacaacgactggctgaactggcagagcgtaattggcagtcgcaaagtgtggcgtttcagtcccaatgccgccaacagcgatttcaccgccaccaatatccatgtgaccagccacggtacggaatttaccctacaaaccccaaccggtagcgtcgatgttctgctgccgttgccggggcgtcacaatattgcgaatgcgctggcagccgctgcgctctccatgtccgtgggcgcaacgcttgatgctatcaaagcggggctggcaaatctgaaagctgttccaggccgtctgttccccatccaactggcagaaaaccagttgctgctcgacgactcctacaacgccaatgtcggtagtatgactgcagcagtccaggtactggctgaaatgccgggctaccgcgtgctggtggtgggcgatatggcggaactgggcgctgaaagcgaagcctgccatgtacaggtgggcgaggcggcaaaagctgctggtattgaccgcgtgttaagcgtgggtaaacaaagccatgctatcagcaccgccagcggcgttggcgaacattttgctgataaaactgcgttaattacgcgtcttaaattactgattgctgagcaacaggtaattacgattttagttaagggtagtcgtagtgccgccatggaagaggtagtacgcgctttacaggagaatgggacatgttaatataagctttacaggagaatgggacatgttagtttggctggccgaacatttggtcaaatattattccggctttaacgtcttttcctatctgacgtttcgcgccatcgtcagcctgctgaccgcgctgttcatcagtttgtggatgggcccgcgtatgattgctcatttgcaaaaactttcctttggtcaggtggtgcgtaacgacggtcctgaaagtcacttcagcaagcgcggtacgccgaccatgggcgggattatgatcctgacggcgattgtgatctccgtactgctgtgggcttacccgtccaatccgtacgtctggtgcgtgttggtggtgctggtaggttacggtgttattggctttgttgatgattatcgcaaagtggtgcgtaaagacaccaaagggttgatcgctcgttggaagtatttctggatgagcgtcattgcgctgggtgtcgccttcgccctgtaccttgccggcaaagacacgcccgcaacgcagctggtggtcccattctttaaagatgtgatgccgcagctggggctgttctacattctgctggcttacttcgtcattgtgggtactggcaacgcggtaaacctgaccgatggtctcgacggcctggcaattatgccgaccgtatttgtcgccggtggttttgcgctggtggcgtgggcgaccggcaatatgaactttgccagctacttgcatataccgtatctgcgacacgccggggaactggttattgtctgtaccgcgatagtcggggcaggactgggcttcctgtggtttaacacctatccggcgcaggtctttatgggcgatgtaggtagcctggcgttaggtggtgcgttaggcattatcgccgtactgctacgtcaggaattcctgctggtgattatggggggcgtgttcgtggtagaaacgctttctgtcatcctgcaggtcggctcctttaaactgcgcggacaacgtattttccgcatggcaccgattcatcaccactatgaactgaaaggctggccggaaccgcgcgtcattgtgcgtttctggattattagcctgatgctggttctgattggtctggcaacgctgaaggtacgttaatcatggctgattatcagggtaaaaatgtcgtcattatcggcctgggcctcaccgggctttcctgcgtggactttttcctcgctcgcggtgtgacgccgcgcgttatggatacgcgtatgacaccgcctggcctggataaattacccgaagccgtagaacgccacacgggcagtctgaatgatgaatggctgatggcggcagatctgattgtcgccagtcccggtattgcactggcgcatccatccttaagcgctgccgctgatgccggaatcgaaatcgttggcgatatcgagctgttctgtcgcgaagcacaagcaccgattgtggcgattaccggttctaacggcaaaagcacggtcaccacgctagtgggtgaaatggcgaaagcggcgggggttaacgttggtgtgggtggcaatattggcctgcctgcgttgatgctactggatgatgagtgtgaactgtacgtgctggaactgagcagcttccagctggaaaccacctccagcttacaggcggtagcagcgaccattctgaacgtgactgaagatcatatggatcgctatccgtttggtttacaacagtatcgtgcagcaaaactgcgcatttacgaaaacgcgaaagtttgcgtggttaatgctgatgatgccttaacaatgccgattcgcggtgcggatgaacgctgcgtcagctttggcgtcaacatgggtgactatcacctgaatcatcagcagggcgaaacctggctgcgggttaaaggcgagaaagtgctgaatgtgaaagagatgaaactttccgggcagcataactacaccaatgcgctggcggcgctggcgctggcagatgctgcagggttaccgcgtgccagcagcctgaaagcgttaaccacattcactggtctgccgcatcgctttgaagttgtgctggagcataacggcgtacgttggattaacgatagcaaagcgaccaacgtcggcagtacggaagcggcgctgaatggcctgcacgtagacggcacactgcatttgttgctgggtggcgatggtaaaagcgcggactttagcccactggcgcgttacctgaatggcgataacgtacgtctgtattgtttcggtcgtgacggcgcgcagctggcggcgctacgcccggaagtggcagaacaaaccgaaactatggaacaggcgatgcgcttgctggctccgcgtgttcagccgggcgatatggttctgctctccccagcctgtgccagccttgatcagttcaagaactttgaacaacgaggcaatgagtttgcccgtctggcgaaggagttaggttgatgcgtttatctctccctcgcctgaaaatgccgcgcctgccaggattcagtatcctggtctggatctccacggcgctaaagggctgggtgatgggcagccgggaaaaagataccgacagcctgatcatgtacgatcgcaccttactgtggctgaccttcggcctcgcggcgattggctttatcatggtgaccagcgcgagtatgcccatagggcaacgcttaaccaacgatccgttcttcttcgcgaagcgtgatggtgtctatctgattttggcgtttattctggcgatcattacgctgcgtctgccgatggagttctggcaacgctacagtgccacgatgctgctcggatctatcatcctgctgatgatcgtcctggtagtgggtagcagcgttaaaggggcaagccgttggatcgatctcggtttgctgcgtatccagcctgcggagctgacaaaactgagcctgttttgctatatcgccaactatctggtgcgtaaaggcgacgaagtacgtaataacctgcgcggcttcctgaaaccgatgggcgtgattctggtgttggcagtgttactgctggcacagccagaccttggtacggtggtggtgttgtttgtgactacgctggcgatgttgttcctggcgggagcgaaattgtggcagttcattgccattatcggtatgggcattagtgcggttgtgttgctgatactcgccgaaccgtaccgtatccgccgtgttaccgcattctggaacccgtgggaagatccctttggcagcggctatcagttaacgcaaagcctgatggcgtttggtcgcggcgaactttgggggcaaggtttaggtaacagcgtacaaaaactggagtatctgccggaagcgcacactgactttattttcgccattatcggcgaagaactggggtatgtcggtgtggtgctggcacttttaatggtattcttcgtcgcttttcgcgcgatgagcattggccgtaaagcattagaaattgaccaccgtttttccggttttctcgcctgttctattggcatctggtttagcttccaggcgctggttaacgtaggcgcggcggcggggatgttaccgaccaaaggtctgacattgccgctgatcagttacggtggtagcagcttactgattatgagcacagccatcatgatgctgttgcgtattgattatgaaacgcgtctggagaaagcgcaggcgtttgtacgaggtagtcgatgagtggtcaaggaaagcgattaatggtgatggcaggcggaaccggtggacatgtattcccgggactggcggttgcgcaccatctaatggctcagggttggcaagttcgctggctggggactgccgaccgtatggaagcggacttagtgccaaaacatggcatcgaaattgatttcattcgtatctctggtctgcgtggaaaaggtataaaagcactgatagctgccccgctgcgtatcttcaacgcctggcgtcaggcgcgggcgattatgaaagcgtacaaacctgacgtggtgctcggtatgggaggctacgtgagtggtccaggtggtctggccgcgtggagcttaggcattccggttgtacttcatgaacaaaacggtattgcgggcttaaccaataaatggctggcgaagattgccaccaaagtgatgcaggcgtttccaggtgctttccctaatgcggaagtagtgggtaacccggtgcgtaccgatgtgttggcgctgccgttgccgcagcaacgtttggctggacgtgaaggtccggttcgtgtgctggtagtgggtggttctcagggcgcacgcattcttaaccagacaatgccgcaggttgctgcgaaactgggtgatagtgtcactatctggcatcagagcggcaaaggtagccaacaatccgttgaacaggcgtatgccgaagcggggcaaccgcagcataaagtgacggaatttattgatgatatggcggcggcgtatgcgtgggcggatgtcgtcgtttgccgctccggtgcgttaacggtgagtgaaatcgccgcggcaggactaccggcgttgtttgtgccgtttcaacataaagaccgccagcaatactggaatgcgctaccgctggaaaaagcgggcgcagccaaaattatcgagcagccacagcttagcgtggatgctgtcgccaacaccctggccgggtggagccgagaaaccttattaaccatggcagaacgcgcccgcgctgcatccattccggatgccaccgagcgagtggcaaatgaagtgagccgggttgcccgggcgtaattgtagcgatgccttttgcatcgtatgaatttaagaagttaatggcgtaaagaatgaatacacaacaattggcaaaactgcgttccatcgtgcccgaaatgcgtcgcgttcggcacatacattttgtcggcattggtggtgccggtatgggcggtattgccgaagttctggccaatgaaggttatcagatcagtggttccgatttagcgccaaatccggtcacgcagcagttaatgaatctgggtgcgacgatttatttcaaccatcgcccggaaaacgtacgtgatgccagcgtggtcgttgtttccagcgcgatttctgccgataacccggaaattgtcgccgctcatgaagcgcgtattccggtgatccgtcgtgccgaaatgctggctgagttaatgcgttttcgtcatggcatcgccattgccggaacgcacggcaaaacgacaaccaccgcgatggtttccagcatctacgcagaagcggggctcgacccaaccttcgttaacggcgggctggtaaaagcggcgggggttcatgcgcgtttggggcatggtcggtacctgattgccgaagcagatgagagtgatgcaagcttcctgcatctgcaaccgatggtggcgattgtcaccaatatcgaagccgaccacatggatacctaccagggcgactttgagaatttaaaacagacttttattaattttctgcacaacctgccgttttacggtcgtgcggtgatgtgtgttgatgatccggtgatccgcgaattgttaccgcgagtggggcgtcagaccacgacttacggcttcagcgaagatgccgacgtgcgtgtagaagattatcagcagattggcccgcaggggcactttacgctgctgcgccaggacaaagagccgatgcgcgtcaccctgaatgcgccaggtcgtcataacgcgctgaacgccgcagctgcggttgcggttgctacggaagagggcattgacgacgaggctattttgcgggcgcttgaaagcttccaggggactggtcgccgttttgatttcctcggtgaattcccgctggagccagtgaatggtaaaagcggtacggcaatgctggtcgatgactacggccaccacccgacggaagtggacgccaccattaaagcggcgcgcgcaggctggccggataaaaacctggtaatgctgtttcagccgcaccgttttacccgtacgcgcgacctgtatgatgatttcgccaatgtgctgacgcaggttgataccctgttgatgctggaagtgtatccggctggcgaagcgccaattccgggagcggacagccgtagcctgtgtcgcacaattcgtggacgtgggaaaattgatcccattctggtgccggatccggcgcgggtagccgagatgctggcaccggtattaaccggtaacgacctgattctcgttcagggggctggtaatattggaaaaattgcccgttctttagctgaaatcaaactgaagccgcaaactccggaggaagaacaacatgactgataaaatcgcggtcctgttgggtgggacctccgctgagcgggaagtttctctgaattctggcgcagcggtgttagccggactgcgtgaaggcggtattgacgcgtatcctgtcgacccgaaagaagtcgacgtgacgcaactgaagagcatgggctttcagaaagtgtttatcgcgctacacggtcgcggcggtgaagatggtacgctgcaggggatgctcgagctgatgggcttgccttataccggaagcggagtgatggcatctgcgcttagtatggataaactacgcagcaaacttctatggcaaggtgccggtttaccggtcgcgccgtgggtagcgttaacccgcgcagagtttgaaaaaggcctgagcgataagcagttagcagaaatttctgctctgggtttgccggttatcgttaagccgagccgcgaaggttccagtgtgggaatgagtaaagtagtagcagaaaatgctctacaagatgcattaagattggcatttcagcacgatgaagaagtattgattgaaaaatggctaagtgggccggagttcacggttgcgatactcggtgaagaaattttaccgagtatacgtattcaaccgtccggaaccttctatgattatgaggcgaagtatctctctgatgagacacagtatttctgccccgcaggtctggaagcgagtcaagaggccaatttgcaggcattagtgctgaaagcatggacgacgttaggttgcaaaggatggggacgtattgacgttatgctggacagcgatggacagttttatctgctggaagccaataccagtccgggtatgaccagccacagcctggtgccgatggcggcacgtcaggcaggtatgagcttcagccagttggtagtacgaattctggaactggcggactaatatgagccaggctgctctgaacacgcgaaacagcgaagaagaggtttcttctcgccgcaataatggaacgcgtctggcggggatccttttcctgctgaccgttttaacgacagtgttggtgagcggctgggtcgtgttgggctggatggaagatgcgcaacgcctgccgctcagtaagctggtgttgaccggtgaacgccattacacacgtaatgacgatatccggcagagcatcctggcattgggtgagccgggtacctttatgacccaggatgtcaacatcatccagacgcaaatagaacaacgcctgccgtggattaagcaggtgagcgtcagaaagcagtggcctgatgaattgaagattcatctggttgaatatgtgccgattgcgcggtggaatgatcaacatatggtagacgcggaaggaaataccttcagcgtgccgccagaacgcaccagcaagcaggtgcttccaatgctgtatggcccggaaggcagcgccaatgaagtgttgcagggctatcgcgaaatggggcagatgctggcaaaggacagatttactctgaaggaagcggcgatgaccgcgcggcgttcctggcagttgacgctgaataacgatattaagctcaatcttggccggggcgatacgatgaaacgtttggctcgctttgtagaactttatccggttttacagcagcaggcgcaaaccgatggcaaacggattagctacgttgatttgcgttatgactctggagcggcagtaggctgggcgcccttgccgccagaggaatctactcagcaacaaaatcaggcacaggcagaacaacaatgatcaaggcgacggacagaaaactggtagtaggactggagattggtaccgcgaaggttgccgctttagtaggggaagttctgcccgacggtatggtcaatatcattggcgtgggcagctgcccgagccgtggtatggataaaggcggggtgaacgacctcgaatccgtggtcaagtgcgtacaacgcgccattgaccaggcagaattgatggcagattgtcagatctctagcgtatatctggcgctttctggtaagcacatcagctgccagaatgaaattggtatggtgcctatttctgaagaagaagtgacgcaagaagatgtggaaaacgtcgtccataccgcgaaaagcgtgcgtgtgcgcgatgagcatcgtgtgctgcatgtgatcccgcaagagtatgcgattgactatcaggaagggatcaagaatccggtaggacttagcggcgtgcggatgcaggcaaaagtgcacctgatcacatgtcacaacgatatggcgaaaaacatcgtcaaagcggttgaacgttgtgggctgaaagttgaccaactgatatttgccggactggcaagtagttatagcgtattgacggaagatgaacgtgaactgggtgtctgcgtcgtcgatatcggtggtggtacaatggatatcgccgtttataccggtggggcattgcgccacactaaggtaattccttatgctggcaatgtcgtgaccagtgatatcgcttacgcctttggcacgccgccaagcgacgccgaagcgattaaagttcgccacggttgtgcgctgggttccatcgttggaaaagatgagagcgtggaagtgccgagcgtaggtggtcgtccgccacggagtctgcaacgtcagacactggcagaggtgatcgagccgcgctataccgagctgctcaacctggtcaacgaagagatattgcagttgcaggaaaagcttcgccaacaaggggttaaacatcacctggcggcaggcattgtattaaccggtggcgcagcgcagatcgaaggtcttgcagcctgtgctcagcgcgtgtttcatacgcaagtgcgtatcggcgcgccgctgaacattaccggtttaacggattatgctcaggagccgtattatagcacggcggtgggattgcttcactatgggaaagagagtcatcttaacggtgaagctgaagtagaaaaacgtgttacagcaagtgttggcagctggatcaagcgactcaatagttggctgcgaaaagagttttaatttttatgaggccgacgatgattacggcctcaggcgacaggcacaaatcggagagaaactatgtttgaaccaatggaacttaccaatgacgcggtgattaaagtcatcggcgtcggcggcggcggcggtaatgctgttgaacacatggtgcgcgagcgcattgaaggtgttgaattcttcgcggtaaataccgatgcacaagcgctgcgtaaaacagcggttggacagacgattcaaatcggtagcggtatcaccaaaggactgggcgctggcgctaatccagaagttggccgcaatgcggctgatgaggatcgcgatgcattgcgtgcggcgctggaaggtgcagacatggtctttattgctgcgggtatgggtggtggtaccggtacaggtgcagcaccagtcgtcgctgaagtggcaaaagatttgggtatcctgaccgttgctgtcgtcactaagcctttcaactttgaaggcaagaagcgtatggcattcgcggagcaggggatcactgaactgtccaagcatgtggactctctgatcactatcccgaacgacaaactgctgaaagttctgggccgcggtatctccctgctggatgcgtttggcgcagcgaacgatgtactgaaaggcgctgtgcaaggtatcgctgaactgattactcgtccgggtttgatgaacgtggactttgcagacgtacgcaccgtaatgtctgagatgggctacgcaatgatgggttctggcgtggcgagcggtgaagaccgtgcggaagaagctgctgaaatggctatctcttctccgctgctggaagatatcgacctgtctggcgcgcgcggcgtgctggttaacatcacggcgggcttcgacctgcgtctggatgagttcgaaacggtaggtaacaccatccgtgcatttgcttccgacaacgcgactgtggttatcggtacttctcttgacccggatatgaatgacgagctgcgcgtaaccgttgttgcgacaggtatcggcatggacaaacgtcctgaaatcactctggtgaccaataagcaggttcagcagccagtgatggatcgctaccagcagcatgggatggctccgctgacccaggagcagaagccggttgctaaagtcgtgaatgacaatgcgccgcaaactgcgaaagagccggattatctggatatcccagcattcctgcgtaagcaagctgattaagaattgactggaatttgggtttcgaggctctttgtgctaaactggcccgccgaatgtatagtacacttcggttggataggtaatttggcgagataatacgatgatcaaacaaaggacacttaaacgtatcgttcaggcgacgggtgtcggtttacataccggcaagaaagtcaccctgacgttacgccctgcgccggccaacaccggggtcatctatcgtcgcaccgacttgaatccaccggtagatttcccggccgatgccaaatctgtgcgtgataccatgctctgtacgtgtctggtcaacgagcatgatgtacggattagtaccgtagagcacctcaatgctgctctcgcgggcttgggcatcgataacattgttatcgaagttaacgcgccggaaatcccgatcatggacggcagcgccgctccgtttgtatacctgctgcttgacgccggtatcgacgagttgaactgcgccaaaaaatttgttcgcatcaaagagactgttcgtgtcgaagatggcgataagtgggctgaatttaagccgtacaatggttttagcctggatttcaccatcgattttaaccatccggctattgattccagcaaccagcgctatgcgatgaacttctccgctgatgcgtttatgcgccagatcagccgtgcgcgtacgttcggtttcatgcgtgatatcgaatatctgcagtcccgtggtttgtgcctgggcggcagcttcgattgtgccatcgttgttgacgattatcgcgtactgaacgaagacggcctgcgttttgaagacgaatttgtgcgtcacaaaatgctcgatgcgatcggtgacttgttcatgtgtggtcacaatattattggtgcatttaccgcttataaatccggtcatgcactgaataacaaactgctgcaggctgtcctggcgaaacaggaagcctgggaatatgtgaccttccaggacgacgcagaactgccgttggccttcaaagcgcctagtgctgtactggcataacgacatttatactgtcgtataaaattcgactggcaaatctggcactctctccggccaggtgaaccagtcgtttttttttgaattttataagagctataaaaaacggtgcgaacgctgttttcttaagcacttttccgcacaacttatcttcattcgtgctgtggactgcaggctttaatgataagatttgtgcgctaaatacgtttgaatatgatcgggatggcaataacgtgagtggaatactgacgcgctggcgacagtttggtaaacgctacttctggccgcatctcttattagggatggttgcggcgagtttaggtttgcctgcgctcagcaacgccgccgaaccaaacgcgcccgcaaaagcgacaacccgcaaccacgagcctagtgccaaagttaactttggtcaattggccttgctggaagcgaacacacgccgcccgaatagcaactattccgttgattactggcatcaacatgccattcgcacggtaatccgtcatctttctttcgcaatggcaccgcaaacactgcccgttgctgaagaatctttgcctcttcaggcgcaacatcttgcattactggatacgctcagcgcgctgctgacccaggaaggcacgccgtctgaaaagggttatcgcattgattatgcgcattttaccccacaagcaaaattcagcacgcccgtctggataagccaggcgcaaggcatccgtgctggccctcaacgcctcacctaacaacaataaacctttacttcattttattaactccgcaacgcggggcgtttgagattttattatgctaatcaaattgttaactaaagttttcggtagtcgtaacgatcgcaccctgcgccggatgcgcaaagtggtcaacatcatcaatgccatggaaccggagatggaaaaactctccgacgaagaactgaaagggaaaaccgcagagtttcgtgcacgtctggaaaaaggcgaagtgctggaaaatctgatcccggaagctttcgccgtggtacgtgaggcaagtaagcgcgtctttggtatgcgtcacttcgacgttcagttactcggcggtatggttcttaacgaacgctgcatcgccgaaatgcgtaccggtgaaggaaaaaccctgaccgcaacgctgcctgcttacctgaacgcactaaccggtaaaggcgtgcacgtagttaccgtcaacgactacctggcgcaacgtgacgccgaaaacaaccgtccgctgtttgaattccttggcctgactgtcggtatcaacctgccgggcatgccagcaccggcaaagcgcgaagcttacgcagctgacatcacttacggtacgaacaacgaatacggctttgactacctgcgcgacaacatggcgttcagccctgaagaacgtgtacagcgtaaactgcactatgcgctggtggacgaagtggactccatcctgatcgatgaagcgcgtacaccgctgatcatttccggcccggcagaagacagcagcgaaatgtataaacgcgtgaataaaattattccgcacctgatccgtcaggaaaaagaagactccgaaaccttccagggcgaaggccacttcagcgtggacgaaaaatctcgccaggtgaacctgaccgaacgtggtctggtgctgattgaagaactgctggtgaaagagggcatcatggatgaaggggagtctctgtactctccggccaacatcatgctgatgcaccacgtaacggcggcgctgcgcgctcatgcgctgtttacccgtgacgtcgactacatcgttaaagatggtgaagttatcatcgttgacgaacacaccggtcgtaccatgcagggccgtcgctggtccgatggtctgcaccaggctgtggaagcgaaagaaggtgtgcagatccagaacgaaaaccaaacgctggctagcatcaccttccagaactacttccgtctgtatgaaaaactggcggggatgaccggtactgctgataccgaagctttcgaatttagcagtatctacaagctggataccgtcgttgttccgaccaaccgtccaatgattcgtaaagatctgccggacctggtctacatgactgaagcggaaaaaattcaggcgatcattgaagatatcaaagaacgtactgcgaaaggccagccggtgctggtgggtactatctccatcgaaaaaagcgagctggtgagtaacgaactgaccaaagccggtattaagcacaacgtcctgaacgccaaattccacgccaacgaagcggcgattgttgctcaggcaggttatccggctgcggtgactatcgcgaccaatatggcgggtcgtggtacagatattgtgctcggtggtagctggcaggcagaagttgccgcgctggaaaatccgaccgcagagcaaattgaaaaaattaaagccgactggcaggtacgtcacgatgcggtactggaagcaggtggcctgcatatcatcggtaccgagcgtcacgaatcccgtcgtatcgataaccagttgcgcggtcgttctggtcgtcagggggatgctggttcttcccgtttctacctgagcatggaagatgcgctgatgcgtatttttgcttccgaccgagtatccggcatgatgcgtaaactgggtatgaagccaggcgaagccattgaacacccgtgggtgactaaagcgattgccaacgcccagcgtaaagttgaaagccgtaacttcgacattcgtaagcaactgctggaatatgatgacgtggctaacgatcagcgtcgcgccatttactcccagcgtaacgaactgttggatgtcagcgatgtgagcgaaaccattaacagcattcgtgaagatgtgttcaaagcgaccattgatgcctacattccaccacagagcctggaagaaatgtgggatattccggggctgcaggaacgtctgaagaacgatttcgacctcgatttgccaattgccgagtggctggataaagaaccagaactgcatgaagagacgctgcgtgagcgcattctggcgcagtccatcgaagtgtatcagcgtaaagaagaagtggttggtgctgagatgatgcgtcacttcgagaaaggcgtcatgctgcaaacgcttgactccctgtggaaagagcacctggcagcgatggactatctgcgtcagggtatccacctgcgtggctacgcacagaaagatccgaagcaggaatacaaacgtgaaagcttctccatgtttgcagcgatgctggagagcttgaaatatgaagttatcagtacgctgagcaaagttcaggtacgtatgcctgaagaggttgaggagctggaacaacagcgtcgtatggaagccgagcgtttagcgcaaatgcagcagcttagccatcaggatgacgactctgcagccgcagctgcactggcggcgcaaaccggagagcgcaaagtaggacgtaacgatccttgcccgtgcggttctggtaaaaaatacaagcagtgccatggccgcctgcaataaaagctaactgttgaagtaaaaggcgcaggattctgcgccttttttataggtttaagacaatgaaaaagctgcaaattgcggtaggtattattcgcaacgagaacaatgaaatctttataacgcgtcgcgcagcagatgcgcacatggcgaataaactggagtttcccggcggtaaaattgaaatgggtgaaacgccggaacaggcggtggtgcgtgaacttcaggaagaagtcgggattaccccccaacattttagcctatttgaaaaactggaatatgaattcccggacaggcatataacactgtggttttggctggtcgaacgctgggaaggggagccgtggggtaaagaagggcaacccggtgagtggatgagcctggtcggtcttaatgccgatgattttccgccagccaatgaaccggtaattgcgaagcttaaacgtctgtaagtcagataaggcgttttcgccgcatccgacattcgcacacgatgcctgatgcgacgctggcgcgtcttatcaggcctaaagggatttctaactcattgataaatttgtttttgtaggtcggataaggcgttcacgccgcatccgacatttgcacaagatgcctgatgcgacgctgtccgcgtcttatcaggcctacgtgcggcatcagacaaatgtcactgctttggttcttcgctccagtcatcgctttcggaaagatcgccactgctggggattcgtttttcttcagcagcccattctccgaggtcgatcagctgacaacgtttggagcaaaatggccgaaacgggctgatttcaccccacaccaccgttttcccgcaggttgggcaattcaccgtaatagtttcactcatttttactccttagcaacaggccagttcgaaatccagacgttccggtacctgtccgttttcagtgtccagcggcataaaacgaatggcaaaacggctcttatgtccggaaatttgcggataaagctgactatcgaggctcagattcaggcgcagcaagtcggcatcgccaccgttatcctgataaaaaccattcaggctggtttgtttacggaagggggcgctctggcgaattaaatccagcaccatggtaagtgcctgggtgagcgggttcaggctggcaatccaggtttctacctggctgtcgcgctgcgcctggggtagatgcagccaaatgtgcaatgtaggtaaatcaaagctgcaacagccgcctgggatgctcagtcgctgacgcaccagagcaatcaaacgatcttcacgcagaaattgcccgatacgcggcgcggaaattaatacgctccccgccgcttttaactgctgaattaatgcttcaatacggctctggtccacgccaggcacgccaatccaggtctggagtttacgttgctgccggtcaagttctttcaacagctcagtgcggacttcgccgcgctcgaaaacatccagtaattcactgacattacggaagaaatgcagcgcgccagcgtggtcaacgatgggtaaattaacggtgagttgctgaatcaaaaactcaatgcgcagccatgtacgcattttttcatttagtggatgttcaaaaaggacctgggtctgcattacggtttttcctgactgacaaactggctcgcaagctgcaaatagtgtgcgtgcaggcgggcaacatcgcttgcgatagcatccggtgcgccgttattatcaatgacgtcatctgccacggcaaggcgggcttcgcgcgttgcctgagcagcaaggatttgttcgacatgctcgcgagttacatcatcgcgctgcatggtgcgcttaagttgcgtttctgggctgacatccaccacaagcactcgattcgcttttttatacagactgttttctaccagcaatggcacaacccacagtacatagggggaagtagcttgctggatctggtgttgcgtctcttgctgaatcagcggatgcagcagggcgttaagccagtttttctcttccgggttggcgaagatccgctcgcgcaaggcccggcgctgcaatgttccatcagcagcaatcatgttagcgccaaagtgatcagcaatggcatgtagcgcaggtgcacctggttcaaccacctgacgcgcaataatatcggcatcaatgacgttaattccgagatcagcaaacgcattggcaacggtactcttgccactgccaatgcctcccgttaaggcaactatatacctcataatttatattcccgggaattcatcatgattatcaaaacgttaaaaatgagtgcacgaaagcgaaattgatgaaacgttcgctcactatttaccaggtaaatttatgggattgtagcgtaaaaaaagacaatttcgcagtcttgcgccgcattgattagtgcgtatgatagcgtcactggagttgcgctcttacccttatagccattaaccccaggaatccgcacatgcgtattgaagaagatctgaagttaggttttaaagacgttctcatccgccctaaacgctccactcttaaaagccgttccgatgttgaactggaacgtcaattcaccttcaaacatagtggtcagagctggtccggcgtgccgattatcgccgcaaatatggacaccgtaggcacattttctatggcctctgcgctggcttcttttgatattttgactgctgtgcataaacactattctgtcgaagagtggcaagcgtttatcaacaattcttccgctgatgtgctgaaacatgtgatggtttctaccggtacgtctgatgcggatttcgaaaaaactaaacagattctcgacctgaacccggcattaaacttcgtttgtattgacgtggcgaatggttattccgaacacttcgtgcagttcgttgcgaaagcgcgtgaagcgtggccgaccaaaaccatttgtgctggtaacgtagtgactggtgaaatgtgtgaggagcttatcctcagtggtgccgatatcgttaaagttggcattggcccaggttctgtttgtacaactcgcgtcaaaacaggcgtcggttatccgcaactttctgcggtaatcgaatgtgccgatgctgcgcacggtctgggcggaatgatcgtcagcgatggtggctgcaccacgccgggcgatgtggcgaaagcctttggcggcggtgccgatttcgtcatgcttggcggcatgctggcgggccacgaagagagcggcggtcgcatcgttgaggagaacggcgagaaatttatgctgttctacggcatgagctccgagtctgcgatgaaacgtcacgttggcggcgttgcggaatatcgcgcagcagaaggtaaaaccgttaagctgccgctgcgaggcccggttgaaaataccgcgcgagatattttgggcggcctgcgtagtgcttgtacatacgttggggctagtcgcctgaaagagctgaccaagcgcaccacgtttattcgtgtgcaggaacaagaaaaccgcatcttcaacaacctgtaatctcccaacgctggcgtggagcaacacgccagcgttatcccatcccactcatcgcatcgcctaaatggaaaattggcagatacattgccaccaccagcgtaccaataattcctcccgttatgatcagcaacgccggttccagtaaggctgcgaggttatccgccagcgccattgtgttttcccgatgatgatgggcgaggttgtctaacatgagatccagagagccggatgcctctcctgttctcactaattgcaaacagagcgggctaaactcaccggtattttttagcgccagccagatgggttgaccgttactgatatcgtgctggatttgtgtcagaagttgcacccagtacgggcagcgcattgtttctctgacgctctctacgccctgtaaaaaagtaatgcctgcactttgtgtcagcgccagaatcgtaaagatctgcgtgagtttttgtccccgcatcagactacccataatcgggatgcgtaacagcaatttctgccgcactataagccaggtcggtcggcgcatcagcaacttattggctatcgccagcagaaagccgaacaacaccagcagccagctccattcgccactaaagtctgccagcgtcatgatcccctgcgttagtgccggtagtggggtgttgaaggtcttatagatagcggcaaactccggcagaacaaaatgcagcattgccacaaccaccatgattgccatcgctaaaatgatgatgggataacgtaacgcacttttcactttgtcggtcaactgacgctgggctttttgctgacgcgccagttcaaagcagcattcatccagcttaccggtcagttcacccgtgcggatcatcgcctgatagagcggcggaaatacctcactccagggtaataaggcattggaaaaagcaatgccctgttcgagatcgtgcgccaggctttgcagcaacgcttgccattgcttactgggatgctgttccgccagcagagccagcccttcagaaagcgttaaccctgctttgagtagcgtcgccagttgatgaatgacttccgcgcttttatctcctcgccactgcgcagaattgatggcgattcgcttcaggcttagtggggtaaccatctgttgctgtagtgccataagcagtaaagtacggctctctgcccatagcatcccatcttgcgcattgccgtcgccggttatgccatgccagcgccagagttgcttactcgccatgcggcatccccagtacgcggattaactcttcaaaggtggttaagccttgctctacggccaggcagccgttttcaaaaagcgtacgcatacccgcctgtcgtgcgtgcgtttccaggctttcaacgtcggtattagcggaaataagctgacgaatgaccggcgttatgggcagaacttcaaataaggccgtacgaccataaaaaccgtggtagcaatgtacacaaccgggtgcctgccagtggggcagcgggcttggccatacattgtctggaatgtggatgggctccccttgctgccggcgacaatgtgggcaaagtttgcgtaccagacgctgggctattaccagcgtaagcgcgctacttagcatccagcgggcgacccccatttgctgtaaacgtaccagcgtttcgcaggtggaattagtgtgtagggtagacaacaccaggtgaccagtttgcgccgctttaatagcgatctctgctgtttcgccatcgcggatctctccgatcatgatgacgtcaggatcctggcgcaataacgcacgcaaaacgccctgaaaggtgagtccggcacgcggatggatttgcgtctggtttagtccggctatggggatctcaactggatcttcgacgctacaaatattaatgtcagcggtattcagcttttgcagggcactataaagcgtgaccgttttgccgctgccggtagggccagttaccagcaccagtccctgtggttgttgcaaggcatgagcaaagtccgccagttgtaacggctgcattccaagcgtgttgacatccagtgcctgacccacctgctgtaacaaccttaataccaccttttcaccaccccgacatggtaaggtcgcaatacgaaaactgacggcgtttcctgccagttcgacagtgaattgcccgtcctgcggcaggcgatgttccgcaatatccaggtttcccagcacttttaatctggcggttaatgcgactccggcatccggactaacatccggtaaaggatgcaatacgccgtcgatacgcaagcggatgcggtaggcattgtccgctggttcgatatgaatatcagacgcgcgttgttccagcgcagattgtaacgttcgagttagcaactctgctttgggctgatgcttctcctgaacagctacgggcagtgtctgttgtgtgcgactggcgtgaccttccatttgttggcgcgtccagcaggtgatctcaatacgtttggtggtagcgaaatgcaatgcgtccagtagctcatggctaggtgcatcgactaccgcaacatgaaccacctcttcgctggcatccagcaagactccatgataacgcagacacagggcagtgagctgtggaatattcattgccgctccttagttggcgtcatcaaagcggaagacatcttcgcaggcttgctgcaatgcgctgtcactttgaatattgcagttgcgcgtccagccggtgacgccgtttgcgttatcccaacccggtgtcatgacgacgcttagcccattgagactttcttgcccggtcaggctcaccacgccctttgccacactcatggcactaacatagcgggtggtggtagggctgggaatgccattgctgccaccgtcgcaggtatctaatccaccatgttccagcgcgcacaactctacggcggtacggtaaggcacaaaggtttgtagcatgtcggtgagtgcggctttgcgcaggtagttttgataagcgggaataccaatggcgcttaaaatggcaatgatgccaataaccaccatcagttcgataagtgtaaaaccgcgttgcttgtccatctgtttcgctccttgatttggttggcgctactttggcaaacgccatcagcacaggcgaggggcaaaaaacgaaacgggaaagcagattccgaggttttttatttcgttgcagcgaaagacaagaaatttgcgaggcgttacgaagaaagttggggaaggggagattatccgcccgcgatggagcggataaatctgtcaactattagcgaaaacgcatactaaggtcgagtgcttgtacgtgtttagttagcgcaccgacggagataaagtccacgcccgtttcggcaaattcacgcagtgttttgtcagtgacgttgccagacacttccagtagcgccttgccgttggtgcgtttgacggcttcgcgcatctgttctgtttcgaagttatccagcatgatgatatcggctcctgctttcagggcttcatcaagttcttccagattctctacttcgacttctactggcgcatccgggtgcagccaggacgctttttcgaccgcctggcgcacactgccggaggcaataatatggttttctttgatcaggaaggcatcagaaagccccagacggtgattcgctccgccgccgcaaagtaccgcgtatttcagagcactacgcaggccgggtaaggttttgcgcgtatccaacaactgcgtgttggtgccttccagcaattcgacatagtggcgtaccttactggcaactccactaagggtttgcacaaaattaagcgcagtgcgttcgcccgttaacagcacgcgggatgggccttcaagttcgaacaaggattgattggcattgatgacatcgccgtcatccacatgccagattatggtgacatcgtcgcctgccagttgaataaacacctcttcaacccagcgtttgccgcaaaagacgccattctcgcgggtgatcaccgtggcatgagagcgagaattttccggtaaaagttttgccgtaatatcattgttggcatcgactgttccgcctaaatcttcccgcagcgcctgggccaccgcgccggggatatcgagattaatgcgttccagcagctcgtcacgtcgggtgtcagggttatagcggcgaggcggcatgttaaaactccagatagctaacgaatcataaggtagaaacatgctactctgaaccgggtattagcaccacatataaggagatcctgcatgttgttagaacaggggtggctggttggcgcgcgccgcgttcccagtccacattacgattgccgcccggatgacgaaacacccaccctgctggtggtgcacaatattagcctgccgccaggcgagtttggcggtccgtggatcgacgcattattcactggaactattgatccgcaggcacatcctttctttgctgagatcgcccatttgcgcgtctccgctcactgtttgattcgccgtgatggtgaaatagtccagtatgttcctttcgataaacgtgcatggcatgcgggagcctctcagtatcaggggcgcgaacgctgcaatgatttttctattgggattgagcttgaaggcaccgatacgctggcgtataccgatgcgcagtatcaacagcttgcggcggttacgcgggcactgattgattgctatccggatatcgctaaaaacatgacgggccattgtgatattgcgccggatcggaaaaccgatcccggtcctgcatttgattgggcacggtttcgtgtgctggtcagcaaggagacaacatgacgctatttacaaccttactggtgttaattttcgagcgcctgtttaagttgggcgagcactggcagcttgatcatcgtcttgaagcgttctttcggcgggtgaaacatttttctctcgggcgcacgttaggcatgaccattattgcgatgggcgtgacttttttactgttacgcgcattgcagggagtattgttcaacgttcccacgctactggtgtggctgctgattggtttgctgtgtattggcgcaggtaaagttcgtcttcattatcatgcttatctgacagctgctagtcgtaatgatagccatgcccgtgccacgatggctggcgaactcaccatgattcacggcgtcccggcaggctgcgacgaacgtgagtatttgcgtgagctgcaaaatgcattgctgtggattaactttcgtttttatcttgcaccgctgttctggctgattgtggggggaacctggggacccgttacgctgatggggtatgcgtttttgcgtgcatggcaatactggctggcgcgatatcagacgccgcatcatcgtttacagtccggcattgatgccgtgcttcatgtactggattgggtgccggttcgtcttgcgggtgtggtatatgccttgatcggtcatggtgagaaagcgttaccggcctggtttgctagcctgggtgatttccatactagccagtatcaggtgttaacgcgtctggcgcagttctctctggcgcgtgaaccgcatgtcgataaggtggagacgccgaaggcagcggttagtatggcgaagaaaaccagcttcgtggtcgtggtggtgattgcactactgacgatttacggggcgttggtgtaaagattattgccctcaccctgtacgggtgagggcgtagagagattaatgcgcttttacggctttggcggttttctctttaaacagatagccgatacctaacacgatcagccataccgggatcaggtatacgctaatcgccattcctggggtcatcagcataatcaccagtaccgccgccataaacagcaggcagatccagttacccagcggataaagcagagcagggaagcgagttaccacgccttgttcctgcttggcgcgacggaatttcatatgcgccaggctaatcatcgcccagttgattaccagtgcagataccaccagcgccattaacagtccgaaagcggactctggggcaaggtagttaatcagtacgcacaacgccgttaccagtgcagacaccagaatggtatttactggtacaccacgtttatcgacagacgccagcgcttttggcgcattaccctgttgtgccagaccaaacagcatacggctgttgcaatatacgcagctgttgtacacggagagcgccgcagtcagtaccacgatgttcagcgcattcgccacaaaggtatcgcctaactcgtggaagatcagcacaaacggactggtatcggcggtaacgcgggtccacggcatcagactgagcagaacggctaagctaccaatatagaaaatcaggatgcggtagataacctggttagttgctttcggtatactttgctccgggttatcagcttctgctgcggtgatccccaccagttccagaccaccgaagctgaacatgataatcgccatcatcatcaccagcccggtgaagccgtgcggcaggaaaccaccctgatcccacaggttgctaacggtcgcctgcgggccgccgttgccactgaatagcagccagccgccgaagatgatcatcgctaccaccgcgataactttgataatggcaaaccagaactccatctcgccaaacactttaacgttggtcaggttgatggcgttaatcaccacaaagaatacggcggcagaaacccaggtggggatttccggataccagaactgaatgtatttacccacggcagtcagctcagccatggcaactaaaacgtacagtacccagtagttccagccagaggcgaaaccggcaaaactgccccagtatttataagcaaagtggctaaaggagcctgcgacaggttcttcgaccaccatttcacccagctgacgcatgatcagaaaggcgataaaaccagcaatggcgtaacccaggataatccctggccctgcggactgtattacggaggcgctacccaggaataacccggtccctatcgcgccacccagcgcgataagctgaatatggcggtttttaaggccgcgctttagctgctcgccgtgctgttgaccttccatcatgaaacctcgtgcggtggttgtttttttgatctacgcagtgatgcgtgtgtaagtttgcaattccgtttgttgtattaatttgtttacatcaaagaagtttgaattgttacaaaaagacttccgtcagatcaagaataatggtatgcggcagcgaatgcacccgctttatgcatggttgaagatgagttgcttaaaaagaaaccgtttgtaaagctcagcctcaacccctctcaatatgtagaatgaatttaaattcgttttaattgaattaaaaatcacaaaattggtaagtgaatcggttcaattcggatttttatagtttaataatcgttaaaaaactcctttcctacgtaaagtctacatttgtgcatagttacaactttgaaacgttatatatgtcaagttgttaaaatgtgcacagtttcatgatttcaatcaaaacctgtatggacataaggtgaatactttgttactttagcgtcacagacatgaaattggtaagaccaattgacttcggcaagtggcttaagacaggaactcatggcctacagcaaaatccgccaaccaaaactctccgatgtgattgagcagcaactggagtttttgatcctcgaaggcactctccgcccgggcgaaaaactcccaccggaacgcgaactggcaaaacagtttgacgtctcccgtccctccttgcgtgaggcgattcaacgtctcgaagcgaagggcttgttgcttcgtcgccagggtggcggcacttttgtccagagcagcctatggcaaagcttcagcgatccgctggtggagctgctctccgaccatcctgagagtcagtatgacttgctcgaaacacgacacgccctggaaggtatcgccgcttattacgccgcgctgcgtagtaccgatgaagacaaggaacgcatccgtgaactccaccacgccatagagctggcgcagcagtctggcgatctggacgcggaaagtaacgccgtactccagtatcagattgccgtcaccgaagcggcccacaatgtggttctgcttcatctgctaaggtgtatggagccgatgttggcccagaatgtccgccagaacttcgaattgctctatagccgtcgcgagatgctgccgctggtgagtagtcaccgcacccgcatatttgaagcgattatggccggtaagccggaagaagcgcgcgaagcaagccatcgccatctggcctttatcgaagaaattttgctcgacagaagtcgtgaagagagccgccgtgagcgttctctgcgtcgtctggagcaacgaaagaattaatgatttttctggtaaaaattatccagaagatgttgtaaatcaagcgcatataaaagcgcggcaactaaacgtagaacctgtcttattgagctttccggcgagagttcaatgggacaggttccagaaaactcaacgttattagatagataaggaataacccatgagtgaacgtttcccaaatgacgtggatccgatcgaaactcgcgactggctccaggcgatcgaaagcgtcatccgtgaagaaggtgttgagcgtgctcagtatctgatcgaccaactgcttgctgaagcccgcaaaggcggtgtaaacgtagccgcaggcacaggtatcagcaactacatcaacaccatccccgttgaagaacaaccggagtatccgggtaatctggaactggaacgccgtattcgtagtgctatccgctggaacgccatcatgacggtgctgcgtgcgagcaaaaaagacctcgaactgggcggccatatggcgtccttccagtcttccgcaaccatttatgatgtgtgctttaaccacttcttccgtgcacgcaacgagcaggatggcggcgacctggtttacttccagggccacatctccccgggcgtgtacgctcgtgctttcctggaaggtcgtctgactcaggagcagctggataacttccgtcaggaagttcacggcaatggcctctcttcctatccgcacccgaaactgatgccggaattctggcagttcccgaccgtatctatgggtctgggtccgattggtgctatttaccaggctaaattcctgaaatatctggaacaccgtggcctgaaagatacctctaaacaaaccgtttacgcgttcctcggtgacggtgaaatggacgaaccggaatccaaaggtgcgatcaccatcgctacccgtgaaaaactggataacctggtcttcgttatcaactgtaacctgcagcgtcttgacggcccggtcaccggtaacggcaagatcatcaacgaactggaaggcatcttcgaaggtgctggctggaacgtgatcaaagtgatgtggggtagccgttgggatgaactgctgcgtaaggataccagcggtaaactgatccagctgatgaacgaaaccgttgacggcgactaccagaccttcaaaagcaaagatggtgcgtacgttcgtgaacacttcttcggtaaatatcctgaaaccgcagcactggttgcagactggactgacgagcagatctgggcactgaaccgtggtggtcacgatccgaagaaaatctacgctgcattcaagaaagcgcaggaaaccaaaggcaaagcgacagtaatccttgctcataccattaaaggttacggcatgggcgacgcggctgaaggtaaaaacatcgcgcaccaggttaagaaaatgaacatggacggtgtgcgtcatatccgcgaccgtttcaatgtgccggtgtctgatgcagatatcgaaaaactgccgtacatcaccttcccggaaggttctgaagagcatacctatctgcacgctcagcgtcagaaactgcacggttatctgccaagccgtcagccgaacttcaccgagaagcttgagctgccgagcctgcaagacttcggcgcgctgttggaagagcagagcaaagagatctctaccactatcgctttcgttcgtgctctgaacgtgatgctgaagaacaagagcatcaaagatcgtctggtaccgatcatcgccgacgaagcgcgtactttcggtatggaaggtctgttccgtcagattggtatttacagcccgaacggtcagcagtacaccccgcaggaccgcgagcaggttgcttactataaagaagacgagaaaggtcagattctgcaggaagggatcaacgagctgggcgcaggttgttcctggctggcagcggcgacctcttacagcaccaacaatctgccgatgatcccgttctacatctattacagcatgttcggcttccagcgtattggcgatctgtgctgggcggctggcgaccagcaagcgcgtggcttcctgatcggcggtacttccggtcgtaccaccctgaacggcgaaggtctgcagcacgaagatggtcacagccacattcagagcctgactatcccgaactgtatctcttacgacccggcttacgcttacgaagttgctgtcatcatgcatgacggtctggagcgtatgtacggtgaaaaacaagagaacgtttactactacatcactacgctgaacgaaaactaccacatgccggcaatgccggaaggtgctgaggaaggtatccgtaaaggtatctacaaactcgaaactattgaaggtagcaaaggtaaagttcagctgctcggctccggttctatcctgcgtcacgtccgtgaagcagctgagatcctggcgaaagattacggcgtaggttctgacgtttatagcgtgacctccttcaccgagctggcgcgtgatggtcaggattgtgaacgctggaacatgctgcacccgctggaaactccgcgcgttccgtatatcgctcaggtgatgaacgacgctccggcagtggcatctaccgactatatgaaactgttcgctgagcaggtccgtacttacgtaccggctgacgactaccgcgtactgggtactgatggcttcggtcgttccgacagccgtgagaacctgcgtcaccacttcgaagttgatgcttcttatgtcgtggttgcggcgctgggcgaactggctaaacgtggcgaaatcgataagaaagtggttgctgacgcaatcgccaaattcaacatcgatgcagataaagttaacccgcgtctggcgtaagaggtaaaagaataatggctatcgaaatcaaagtaccggacatcggggctgatgaagttgaaatcaccgagatcctggtcaaagtgggcgacaaagttgaagccgaacagagcctgatcaccgtagaaggcgacaaagcctctatggaagttccgtctccgcaggcgggtatcgttaaagagatcaaagtctctgttggcgataaaacccagaccggcgcactgattatgattttcgattccgccgacggtgcagcagacgctgcacctgctcaggcagaagagaagaaagaagcagctccggcagcagcaccagcggctgcggcggcaaaagacgttaacgttccggatatcggcagcgacgaagttgaagtgaccgaaatcctggtgaaagttggcgataaagttgaagctgaacagagcctgatcaccgtagaaggcgacaaggcttctatggaagttccggctccgtttgctggcaccgtgaaagagatcaaagtgaacgtgggtgacaaagtgtctaccggcagcctgattatggtcttcgaagtcgcgggtgaagcaggcgcggcagctccggccgctaaacaggaagcagctccggcagcggcccctgcaccagcggctggcgtgaaagaagttaacgttccggatatcggcggtgacgaagttgaagtgactgaagtgatggtgaaagtgggcgacaaagttgccgctgaacagagtctgatcaccgtagaaggcgacaaagcttctatggaagttccggcgccgtttgcaggcgtcgtgaaggaactgaaagtcaacgttggcgataaagtgaaaactggcagcctgattatgatcttcgaagttgaaggcgcagcgcctgcggcagctcctgcgaaacaggaagcggcagcgccggcaccggcagcaaaagctgaagccccggcagcagcaccagctgcgaaagcggaaggcaaatctgaatttgctgaaaacgacgcttatgttcacgcgactccgctgatccgccgtctggcacgcgagtttggtgttaaccttgcgaaagtgaagggcactggccgtaaaggtcgtatcctgcgcgaagacgttcaggcttacgtgaaagaagctatcaaacgtgcagaagcagctccggcagcgactggcggtggtatccctggcatgctgccgtggccgaaggtggacttcagcaagtttggtgaaatcgaagaagtggaactgggccgcatccagaaaatctctggtgcgaacctgagccgtaactgggtaatgatcccgcatgttactcacttcgacaaaaccgatatcaccgagttggaagcgttccgtaaacagcagaacgaagaagcggcgaaacgtaagctggatgtgaagatcaccccggttgtcttcatcatgaaagccgttgctgcagctcttgagcagatgcctcgcttcaatagtagcctgagcgaagacggtcagcgtctgaccctgaagaaatacatcaacatcggtgtggcggtggataccccgaacggtctggttgttccggtattcaaagacgtcaacaagaaaggcatcatcgagctgtctcgcgagctgatgactatttctaagaaagcgcgtgacggtaagctgactgcgggcgaaatgcagggcggttgcttcaccatctccagcatcggcggcctgggtactacccacttcgcgccgattgtgaacgcgccggaagtggctatcctcggcgtttccaagtccgcgatggagccggtgtggaatggtaaagagttcgtgccgcgtctgatgctgccgatttctctctccttcgaccaccgcgtgatcgacggtgctgatggtgcccgtttcattaccatcattaacaacacgctgtctgacattcgccgtctggtgatgtaagtaaaagagccggcccaacggccggcttttttctggtaatctcatgaatgtattgaggttattagcgaatagacaaatcggttgccgtttgttgtttaaaaattgttaacaattttgtaaaataccgacggatagaacgacccggtggtggttagggtattacttcacataccctatggatttctgggtgcagcaaggtagcaagcgccagaatccccaggagcttacataagtaagtgactggggtgagggcgtgaagctaacgccgctgcggcctgaaagacgacgggtatgaccgccggagataaatatatagaggtcatgatgagtactgaaatcaaaactcaggtcgtggtacttggggcaggccccgcaggttactccgctgccttccgttgcgctgatttaggtctggaaaccgtaatcgtagaacgttacaacacccttggcggtgtttgcctgaacgtcggctgtatcccttctaaagcactgctgcacgtagcaaaagttatcgaagaagccaaagcgctggctgaacacggtatcgtcttcggcgaaccgaaaaccgatatcgacaagattcgtacctggaaagagaaagtgatcaatcagctgaccggtggtctggctggtatggcgaaaggccgcaaagtcaaagtggtcaacggtctgggtaaattcaccggggctaacaccctggaagttgaaggtgagaacggcaaaaccgtgatcaacttcgacaacgcgatcattgcagcgggttctcgcccgatccaactgccgtttattccgcatgaagatccgcgtatctgggactccactgacgcgctggaactgaaagaagtaccagaacgcctgctggtaatgggtggcggtatcatcggtctggaaatgggcaccgtttaccacgcgctgggtagtcagattgacgtggttgaaatgttcgaccaggttatcccggcagctgacaaagacatcgttaaagtcttcaccaagcgtatcagcaagaaattcaacctgatgctggaaaccaaagttaccgccgttgaagcgaaagaagacggcatttatgtgacgatggaaggcaaaaaagcacccgctgaaccgcagcgttacgacgccgtgctggtagcgattggtcgtgtgccgaacggtaaaaacctcgacgcaggcaaagcaggcgtggaagttgacgaccgtggtttcatccgcgttgacaaacagctgcgtaccaacgtaccgcacatctttgctatcggcgatatcgtcggtcaaccgatgctggcacacaaaggtgttcacgaaggtcacgttgccgctgaagttatcgccggtaagaaacactacttcgatccgaaagttatcccgtccatcgcctataccgaaccagaagttgcatgggtgggtctgactgagaaagaagcgaaagagaaaggcatcagctatgaaaccgccaccttcccgtgggctgcttctggtcgtgctatcgcttccgactgcgcagacggtatgaccaagctgattttcgacaaagaatctcaccgtgtgatcggtggtgcgattgtcggtactaacggcggcgagctgctgggtgaaatcggcctggcaatcgaaatgggttgtgatgctgaagacatcgcactgaccatccacgcgcacccgactctgcacgagtctgtgggcctggcggcagaagtgttcgaaggtagcattaccgacctgccgaacccgaaagcgaagaagaagtaatttttcgtttgccggaacatccggcaattaaaaaagcggctaaccacgccgctttttttacgtctgcaatttacctttccagtcttcttgctccacgttcagagagacgttcgcatactgcactccgttgctcgttattcagcctgacagtatggttactgtcgtttagacgttgtgggcggctctcctgaactttctcccgaaaaacctgacgttgttcaggacttgcgctttgaacacgctggcgggcgttatcacgttgctgttgattcagtgggcgctgctgtactttttccttaaacacctggcgctgctctggacttgcggactgaatacgctcacgcgctgcgtctcttcgctgctggttctgcgggttagtctgcattttctcgcgaaccgcctggcgctgctcagggctggcggactgaatgcgctcacgcgctgcctctcttcgctgctggatcttcgggttagtctgcattctctcgcgaactgcctggcgctgctcagggctggcggactgataacgctgacgagcggcgtccttttgttgctgggtcagtggttggcgacggctgaagtcgtggaagtcgtcatagctcccatagtgttcagcttcattaaaccgctgtgccgctgcctgacgttgggtatctcgtgtaatgactggtgcggcgtgtgttcgttgctgaaactgatttgctgccgcctgacgctggctgtcgcgcgttggggcaggtaattgcgtggcgctcattccgccgttgacatcggtttgatgaaaccgctttgccatatcctgatcatgatagggcacaccattacggtagtttggattgtgccgccatgccatattcttatcagtaagatgctcaccggtgatacggttgaaattgttgacgtcgatattgatgttgtcgccgttgtgttgccagccattaccgtcacgatgaccgccatcgtggtgatgataatcatcattgtcatgatgatgatggtcatgatcgtcgtcgtcccagtcgatgctgctgaatagtgcgtacgtggtagcaacgcccatgctatagccgaatccgcgtacaaagctgtcaacaaacggttctccggctggtggtggcagataaaccggcggatacgcagtattggcccagttcccgtaaaccacggttgggttgtagttgggaatatagaccacatcaggattggcgggctcaatggaaatgacggttgttgccggctctgtaatgacggggttggcagttaaaactgtattggatggtatgacgggtgccgtgactgtctgttttaccggtacagctttcttcgttgtggtaataactttctgttcggtactactcttcaggctgccggtttgttgcgccagttgccgcaatcgctgtacgctgtccatcacgtcctgcggctgggccagaaaagcatcgcccaggttttgcacccattgcgggttttcgcccatcaatgccatcaattgtggaaaggccaccagacttttaacgctggcgtcccacggctggtcagataccgcctgaatagcagcatcgccttgtttaagtggattatcgtggctccattgcactgcttgagcaacgtttgtcggataggtacttgccatcagcacctggctaagtagggcgtcgggatacagcgcgacgggcgcgacccattgatctatttgtgcagtgctgaatgcggatttgacgacggcgggtgttacgggaggtgcggaaaccgttgcaggaaacgtaaccgcggcagcgtcagacacagccagttgtgtgctttgcggttccacaggcgcttccactgtgcggctttttatatatagcccggtagaggcggcacaaagcccggcactgcaaattagcgccagcacatggggtttaaacggcaaagtcattttcataattcggatctcaaggaaatcgcaatggtcggcgaactgccacccgcaggtgctgtgaatccgagtataaagaggcggtagtttaaattttgactaatcttgggattcgttgagaaaggtgattatcaccatgcgaattaacgaagtttttacggagggaaacaatctctagaccatccttaacgattcagccacttttttatgttgcttttttgtaaacagattaacacctcgtcaaaatcctgctattctgcccgttgcggtactgggcatttaccctacaaactgctgtctcacaggagcgtgaagagaatcgcctgccgcactatgacaatgagagcgaggagaaccgtcgtgctagaagaataccgtaagcacgtagctgagcgtgccgctgaggggattgcgcccaaacccctggatgcaaaccaaatggccgcacttgtagagctgctgaaaaacccgcccgcgggcgaagaagaattcctgttagatctgttaaccaaccgtgttcccccaggcgtcgatgaagccgcctatgtcaaagcaggcttcctggctgctatcgcgaaaggcgaagccaaatcccctctgctgactccggaaaaagccatcgaactgctgggcaccatgcagggtggttacaacattcatccgctgatcgacgcgctggatgatgccaaactggcacctattgctgccaaagcactttctcacacgctgctgatgttcgataacttctatgacgtagaagagaaagcgaaagcaggcaacgaatatgcgaagcaggttatgcagtcctgggcggatgccgaatggttcctgaatcgcccggcgctggctgaaaaactgaccgttactgtcttcaaagtcactggcgaaactaacaccgatgacctttctccggcaccggatgcgtggagtcgcccggatatcccactgcacgcgctggcgatgctgaaaaacgcccgtgaaggtattgagccagaccagcctggtgttgttggtccgatcaagcaaatcgaagctctgcaacagaaaggtttcccgctggcgtacgtcggtgacgttgtgggtacgggttctagccgtaaatccgccactaactccgttctgtggtttatgggcgatgatattccacatgtgccgaacaaacgcggcggtggtttgtgcctcggcggtaaaattgcacccatcttctttaacacgatggaagacgcgggtgcactgccaatcgaagtcgacgtctctaacctgaacatgggcgacgtgattgacgtttacccgtacaaaggtgaagtgcgtaaccacgaaaccggcgaactgctggcgaccttcgaactgaaaaccgacgtgctgattgatgaagtgcgtgctggtggccgtattccgctgattatcgggcgtggcctgaccaccaaagcgcgtgaagcacttggtctgccgcacagtgatgtgttccgtcaggcgaaagatgtcgctgagagcgatcgcggcttcagcctggcgcaaaaaatggtaggccgtgcctgtggcgtgaaaggcattcgtccgggcgcgtactgtgaaccgaaaatgacttctgtaggttcccaggacaccaccggcccgatgacccgtgatgaactgaaagacctggcgtgcctgggcttcagcgctgacctggtgatgcagtctttctgccacaccgcggcgtatccgaagccagttgacgtgaacacgcaccacacgctgccggacttcattatgaaccgtggcggtgtgagcctgcgtccgggtgacggcgtcattcactcctggctgaaccgtatgctgctgccggataccgtcggtaccggtggtgactcccatacccgtttcccgatcggtatctctttcccggcgggttctggtctggtggcgtttgctgccgcaactggcgtaatgccgcttgatatgccggaatccgttctggtgcgcttcaaaggcaaaatgcagccgggcatcaccctgcgcgatctggtacacgctattccgctgtatgcgatcaaacaaggtctgctgaccgttgagaagaaaggcaagaaaaacatcttctctggccgcatcctggaaattgaaggtctgccggatctgaaagttgagcaggcctttgagctaaccgatgcgtccgccgagcgttctgccgctggttgtaccatcaagctgaacaaagaaccgatcatcgaatacctgaactctaacatcgtcctgctgaagtggatgatcgcggaaggttacggcgatcgtcgtaccctggaacgtcgtattcagggcatggaaaaatggctggcgaatcctgagctgctggaagccgatgcagatgcggaatacgcggcagtgatcgacatcgatctggcggatattaaagagccaatcctgtgtgctccgaacgacccggatgacgcgcgtccgctgtctgcggtacagggtgagaagatcgacgaagtgtttatcggttcctgcatgaccaacatcggtcacttccgtgctgcgggtaaactgctggatgcgcataaaggtcagttgccgacccgcctgtgggtggcaccgccaacccgtatggacgccgcacagttgaccgaagaaggctactacagcgtcttcggtaagagtggtgcgcgtatcgagatccctggctgttccctgtgtatgggtaaccaggcgcgtgtggcggacggtgcaacggtggtttccacctctacccgtaacttcccgaaccgtctgggtactggcgcgaatgtcttcctggcttctgcggaactggcggctgttgcggcgctgattggcaaactgccgacgccggaagagtaccagacctacgtggcgcaggtagataaaacagccgttgatacttaccgttatctgaacttcaaccagctttctcagtacaccgagaaagccgatggggtgattttccagactgcggtttaaaaagtcagcgcacgcgctgcgcataaacgacacaatgcccggtgaatgagattcccgggcatttttttatttctaaaccatcgccgttccgctgtttttctccggtaaggctgcgataattacatcaatggcgcaatgcgatttcggtgcattgccgggagcagaggaacacactatggattacgaatttctgcgcgatattaccggagtggtaaaggtgcgtatgtccatggggcatgaagtggtcgggcactggtttaatgaagaggtgaaagaaaacctggccttgcttgatgaagtggaacaagcagcgcacgcactgaaaggtagcgaacggtcctggcaacgggcagggcatgaatacaccctgtggatggacggtgaagaggtgatggttcgcgccaatcaactggaattcgctggcgatgaaatggaagaggggatgaactactacgacgaagaaagcctgagcctatgcggcgttgaggattttctgcaggtcgtggcggcttaccgcaatttcgtgcagcagaagtaaataaatctggcggagcctgggagctccgccagagccgttaaacagctggcatattgcgcccgtaataaatctcgcgcatttctttccacagcgcagcggtaatttcctggcgctcgctgtcggttaagtcttccggtttggtgtggaacatgtagtgcttaaggtcgaactctttaagcaacatcttggtatggaagatattttcctgatagacgttcacatccaccatgtcatacagcgccttcatatcgtcagacataaagttctgaatgctattaatctcatggtcgataaagtgcttcataccgttaatgtcgcgggtaaaaccgcgcacgcgataatcaatggttacgatatcggactcaagctggtggatcaggtaattcagcgccttcagcggagaaatcacgccgcaggtagagacttcaatatcggcgcggaaggtacataaaccgccttcaggatgactttccgggtaggtatgtacgcaaatatgacttttatcaagatgggcaacgaccgtttctggcagtgggccggggtgttctgttttgtcgatgagtttcgggtcaaccggttcttcactcaccagaatagtgacgctggcaccctgtggttcgtaatcctggcgggcgatgttaagaatattagccccgataatggaacaggtttcactcaggatttcggtcagacggttggcattatagagttcatcgatataagcaatataaccgtcgcgctcttcggcagttttggcgtagcagatatcgtaaatacaaaaactcagacttttggtcagattattaaagccatgcagtttcagttttttcaatttcttatcttctccttaggacggctgactagccagtgcgtcttgcagatactgaggtaaggcaaaagctgccgtatggattgccggattgtaataacggcatttcaggccagaggcgagaaaacgcgcctgaataatttcggtactgagatggcgtaaggcgtcgttatctgtcgcccatgcaaaagtcatgataccgccgtaataggtcgggatcgccgcctgataaaagccaacgtcgctgaagtaatggctgagtttgcgatggctgtcgatggcttcttcctgctgtaaaaagcagacgccgttttgtgcgacgaagataccgccaggattcaggcaacgtttgcagccttcataaaatgcgctagtgaaaaggctttcgccgggaccgataggatcggtgcagtcggagataatgacatcaaaggtctggctggtttgattaacgaaattgacgccatcgtcgatcaccagcttaaagcgcggatcgtcgtagctaccggcgttatggttgggtagatactgacggcagaagcttacgacacccgcatcgatttccaccatcgtgatactctcaacgtttttatgtcgggttacttcacgcagcatggcaccgtcgccgccgccgataatcagcacatgtttcgcgtgaccatgggccagtagcggaacatgggtcatcatctcatgatagataaactcgtcgcgctcggtggtttgtactacgccatccagcgccattacgcgaccaaatgcagcgttctcaaaaatgatcagatcctggtgatcggtcttttcatgatacagaacgttatctaccgcaaagtactgcccaaactggtcgtgtagcgtttcatgccactgttttttttcggccatgggttgatacctcctttgttaacacccgtaaaaaaagggcgcaacataatagctaacattgaccgcggatgcacggtcaatatttctacaaaaaggtatcagggattatttgacgtaggcaagcaggcttaaggaatcgcgggccagggctttgcattttttagcgacgggaatgccaatgccgctgagatcgcggtagctgtcttcaccgagggctttcatgtcgaaggtgtcgtaattactgaggtcccactggttttgctgagcgaaaaagaccagtgcgcgacgaatttgcccgttaggtaagttctggtaaccacaatcgttcttcagaaagacaaaaactgccgttaaatcggccatatcttcggcttcagactcgctgagcgcgtaactgtttgcgcagacggccatcaggctgccgaataacactgttctgaaaaacgtcttcattgcttctaccaggggcttaaagaagataaacgttagcacactgcgagcgaggcgacgaccattattgtcgattaaattgtgtctgcggcttgaccttcccgtaaggggaaggactatgctcaacgtttgattttgtttcgcctgcttaagaataaggaaataactatgcaacgtcgtgatttcttaaaatattccgtcgcgctgggtgtggctagcgctttgccgctgtggagccgcgcagtatttgcggcagaacgcccaacgttaccgatccctgatttgctcacgaccgatgcccgtaatcgcattcagttaactattggcgcaggccagtccacctttggcgggaaaactgcaactacctggggctataacggcaatctgctggggccggcggtgaaattacagcgcggcaaagcggtaacggttgatatctacaaccaactgacggaagagacaacgttgcactggcacgggctggaagtaccgggtgaagtcgacggcggcccgcagggaattattccgccaggtggcaagcgcagcgtgacgttgaccgttgatcaacctgccgctacctgctggttccatccgcatcagcacggcaaaaccgggcgacaggtggcgatggggctggctgggctggtggtgattgaagatgacgagatcctgaaattaatgctgccaaaacagtggggtatcgatgatgttccggtgatcgttcaggataagaaatttagcgccgacgggcagattgattatcaactggatgtgatgaccgccgccgtgggctggtttggcgatacgttgctgaccaacggtgcaatctacccgcaacacgctgccccgcgtggttggctgcgcctgcgtttgctcaatggctgtaatgcccgtagcctcaatttcgccaccagcgacaatcgcccgctgtatgtgattgccagcgacggtggtctgctacctgaaccagtgaaggtgagcgaactgccggtgctgatgggcgagcgttttgaagtgctggtggaggttaacgataacaaaccctttgacctggtgacgctgccggtcagccagatggggatggcgattgcgccgtttgataagcctcatccggtaatgcggattcagccgattgctattagtgcctccggtgctttgccagacacattaagtagcctgcctgcgttacctagcctggaagggctgacggtacgcaagctgcaactctctatggacccgatgctcgatatgatggggatgcagatgctaatggagaaatatggcgatcaggcgatggccgggatggatcacagccagatgatgggccatatggggcacggcaatatgaatcatatgaaccacggcgggaagttcgatttccaccatgccaacaaaatcaacggtcaggcgtttgatatgaacaagccgatgtttgcggcggcgaaagggcaatacgaacgttgggttatctctggcgtgggcgacatgatgctgcatccgttccatatccacggcacgcagttccgtatcttgagtgaaaatggcaaaccgccagcggctcatcgcgcgggctggaaagataccgttaaggtagaaggtaatgtcagcgaagtgctggtgaagtttaatcacgatgcaccgaaagaacatgcttatatggcgcactgccatctgctggagcatgaagatacggggatgatgttagggtttacggtataaaaagaccgtattcggaaatatgcccggatctctccgggcattaaactgatgacaaacgcaaatctgcctgatgcgctacgcttatcaggcctacgctagctgtgcaatccattgattttgcacaattttgtaggctggataaggcgttcacgccgcatccggcatgaacaacgcgcacgttgtcagcaatctgagcaagtcttacttcacatcatccggcagcgcataagccacaatatagtcgcccatcttcgtaccaaaactaccgtgaccgcctgcggagatcaccacatactgcttaccattcacttcataggtcattggcgtagcctgaccacccgctggtaaacgaccctgccacagtttttcaccgttgctcatgttgtaagcgcgcaggtagttatctgccgtagcggcgataaacagcacgttacccgccgtggagattggcccgcccagcatcggcatacccatattgaacggcaccggaaccggcatcgggaacggcatactgtcctgcggcgtaccaatacgtttcttccacaccacttcattagttttcagatccagcgcgctgatataaccccatgctggctgtttacatggcagaccaaatggactgaggaacgggttgagcgtgacaccatacggtacaccgtactgtggctgaatgccggattccgtacccgtgcctttggcatctttcggctgctccatcgggttgccaggaccacgcgggatcagtttgctaacaaacggcagtgccattgggttggcaatcgccacttcacgatttggatcaacggaaatcccgccccattcgaacatccccaggttacccgggaagaccagcgtaccctgttcagatggcggggtgaaaatgccttcatagcgcatctggtggaacatcacgcggcacaccagttggtcaaacatggtggctccccacatatccgcaccgctcaaatctttcgtcggacggaagctcagttcagaaaacggttgagttggggttacgtaatcgcctttcgctgcaccttggggaaccggtttttccggtgccggaaccaccagttcgccattacgacgatcgagcacaaaaatgttgccggttttcgccggagcgtaaataactggcactttctgaccattaacggtgatgtccgccagcgtcggctgtgccggaagatccatgtcccacaggtcgtggtgaacggtctggtagctccacgccagtttcccggtagtggcattcagcgccagaatgctgctggcataacgttcctgttccggtgtgcggttaccgccccagatatccggcgtggtcacgcccatcggcagatagaccagatccagcttcgcgtcataggccgctggtgcccaggagtttgggctgttaaaggtaaaggtgtgttcgtcagacgggattgcgttcggatctttcgcgccgggatcaaaagcccacagcagctccccggtgttgacatcaaaaccacggatcacgccagacgtttcgcgggtactgaagttatcggtaacactaccggccatcacgatggttttatcggtgataatcggtgggctagtcggttcatacagacccggtttggtgtctggcatattgctttgcagattgagcacgcctttattggcgaaggtttcgcacagtttgccgttttcagcgttaatcgcaatcagtcgaccatcattgaccggaagaatgatacgacgcgggcaatccgccatcacttccgggctagcggtttctgctttggcttcatgataagagacaccacggcaggttacgtgctggaaagactcgttggttttcagctcaggatcgtaatgccatttctctttgccgctggcggcatcaagcgcaaacaggcgctggtgagcggtacacaggtaaagggtgtcgcccactttaatcggcgtcacttcattggtgatttcacccggatcgttcggctgcttcacatcgccagtacggaacacccaggcttctttcagattatggacgttatcggcgttaatttgtttcagcgggctaaagcgttgaccttcctgattacgaccataggcaggccagtcctgatcggctacgggggagatagcttcagcaggtgtggcatcggcgcttaaggtgccgttgatctcctgcggatcgttaaatccggcccaggtcaggataccaccgctaatcagcagtgcgaccaccagtgcggcaactgcgccgctggcaggaatgaccaggcgacgccagacaaacggcaggatcagccagatgccgaagaagaccagaatgtcgctgcgcggagtcagcgcccagaagtcgaaaccaacttcccagacgccccaaatcatggtgccgagcagcagggctgcgtatagccaaagcgcggcgcgtttactgcgccacagcatccaggcgacgccgagcatcacaaggccagcgatagggtagtaccaggagccgccaatcgcgaccagccagcctccgccaatgagtagatacagcccgcaaagcgctgcaaaaagggctgttagcgtgacgagtaatcgtcggctgcctgtattgttaattgccataaagagacaccatttcaattcattaatattttagtagcaattaattataggttttaacatgtgtgatcgtcatcacaattcgagctttattaacagattccgcgaatgaatagttttactggtatactgcgtgtcttgcgctttgttgcggtgccaaaacctgcccgtgcgaagtgatttgtttttaaatcatatggttagagatatgaaacatactgtagaagtaatgatccccgaagcggagattaaagcgcgtatcgccgaactgggtcgtcagattactgagcgttacaaagacagcggcagcgatatggtgctggtgggtctgctgcgtggcagttttatgtttatggcggacctgtgccgtgaagttcaggtatctcatgaagtcgactttatgaccgcctccagctacggtagcggcatgtccaccacccgtgatgtgaaaatcctcaaagatctggatgaagatatccgtggcaaggacgtgctgattgttgaagatatcatcgacagcgggaatacactgagcaaagtgcgtgagatcttaagcctgcgcgaaccgaagagcctggcgatttgtacgctgctggataaaccgtcccgtcgtgaagtgaacgtcccggtagaatttatcggtttcagcatcccggatgagtttgtggtgggttacggcattgattacgcacagcgttaccgtcatctgccgtatatcggcaaagtgattctgctggacgagtaagtgtgaagttgccggatgtgttgcatccggcatggcatttttatttgtggttggcgtgtttcagcttgaggttggaaatcccgtgacggtaacgttgctcaagggtttcgcggttggtggcggtaacatccagatcacgcagcaagccgtcgtgaatgccgtaggcccagccgtgaatggtaactttctgcccgcgtttccacgcactttgcataatggtggagtggcccaggttatacacctgttccatgacgttcagttcacacaaggtatccagacggcgctcttgcggcatttcgccgagcaaactgctatgtttgaaccagatatcgcggatatgcagcagccagttgttgataagccccagttccgggttttcaactgcggcttgtacgccgccgcaaccgtagtggccacagataataatgtgttcaacttcgagtacatccactgcatactgaaccacggaaaggcagttcaggtcagtgtgaatgaccaggttagcaacattacggtgaacaaagagttcgcccggttcaagaccggttaaacgttctgcaggaacgcgactgtcggaacatccaatccatagaaagcgcggtttttgcgcttgtgccagtttctcaaaaaacccgggatcctcttccaccagcattttactccatagtgcattgttgctgatgagtgtatctatgtctttcatggaggttaacgacctgtaaccaaataattacgtttggctaatatagggcaactccgggacgatttaaaccacagataaagtgtaagaacgtaaggtaagtaaaaatttatgaccattgcactggaacttcaacagcttaaaaaaacctatccaggcggcgttcaggcgcttcgtgggatagatttgcaggtcgaagcgggtgatttttatgcgcttctcgggccgaacggggccgggaaaagcaccactatcggtattatcagctctctggtaaataaaacctccgggcgggtcagcgtatttggttacgatctcgagaaggatgtcgtgaacgctaaacgtcagttgggactggtgccgcaggaatttaacttcaacccgtttgaaaccgtgcagcaaattgtggtgaatcaggcagggtactacggcgtggagcgcaaagaagcgtacatccgcagcgaaaagtatcttaaacaactcgatctatggggaaaacgcaacgaacgtgcgcgtatgttatctggcgggatgaagcgccgtttaatgattgcccgtgcgttaatgcatgaacctaaactactgattctcgacgaaccgaccgcaggcgtggatattgaacttcgccgcagtatgtggggctttttgaaggatttaaacgacaaaggcaccaccatcattctcaccacacactacctggaagaagcagaaatgctgtgccgcaatatcggcattattcaacacggtgagctggtggaaaataccagcatgaaggcgctgctggcgaagctgaaaagcgaaacctttattctcgatctcgcaccgaaaagcccgttaccgaagctcgatggctatcagtatcgactggtcgataccgcgacgctggaagttgaagtgctgcgtgagcaggggatcaacagcgtatttacgcagttaagtgagcagggcattcaggtattaagtatgcgtaacaaagctaaccgtctggaagagctgtttgttagtctggttaatgaaaaacaaggagatcgcgcatgatgcatctttactgggtggcgctaaaaagcatctgggcgaaagagatccatcgctttatgcgtatctgggtgcagacgctggtgccgccagtcatcaccatgaccctttactttattatcttcggtaacctgattggtagccgtattggcgatatgcatggcttcagctatatgcagttcatcgtaccggggctgatcatgatgagcgtgatcaccaatgcctacgccaacgttgcgagtagtttttttggtgccaagttccagcgtaatattgaagagctgctggtagcgccggttccgactcacgtcattattgccggatatgtcggcggtggcgtggcgcgtggtctgtttgttggcattctggtgacggcaattagtctgttttttgtgccatttcaggtgcatagctgggtattcgttgccttaacgctggtgctcacggcggtgttgttctcccttgcgggtttgctgaacggtgtgtttgccaaaacgttcgatgacatcagcctggtgccaacctttgtgttaacgccactcacgtatttgggcggggtcttttacagtctgactttgttgccgccgttctggcaagggctgagccacctgaacccaatcgtttatatgatcagtggtttccgctacggcttcctcggtatcaatgatgttccgctggtcactacctttggcgtactggtggtctttattgtggcgttttatttgatctgttggagcctgatccaacgtggacgtggtttgcgtagctaaggctatttcctctcctctggatttgggggagaggagttttgacggctatcaccctttatcaacaatggtcagggtagactgattttcggctaaggaggaaggcgatgttaggttgggtaattacctgtcacgatgaccgggcgcaagagatactggatgcgctggagaaaaaacatggggcacttcttcagtgccgggccgtgaatttctggcgcggattaagctctaatatgctcagccgcatgatgtgcgatgctctgcatgaagcggactctggtgagggtgtcatcttcttaaccgatatagccggagcgccaccgtatcgcgtggctagtttattaagccacaaacactcccgttgcgaagtgatttctggtgtcacgttaccgttaattgaacagatgatggcttgccgtgaaaccatgaccagtagtgagtttcgcgagcgtattgtcgaactgggtgcgccggaggtgagtagtctttggcaccaacaacaaaaaaatccgcctttcgtcctcaaacataatttgtatgagtattaacccgcgattctgatggcgcttttgctacaataaaagcgttgtttcaccctcggttattttttcatgtacaaacaagctgttattctcctgctgatgctgtttaccgcaagtgtcagtgccgcgttacctgcccgttatatgcaaaccatcgaaaatgctgcggtctgggcgcaaattggtgacaagatggtgaccgtggggaatattcgggccggacaaatcattgccgtggagcccactgccgcaagttattacgcatttaattttggctttggcaaaggttttatcgataaaggtcatctcgagccggttcaggggcgacaaaaagttgaagacggtttgggcgacctcaacaagccgctgagtaatcagaacttagttacctggaaagatacgccggtctataacgcgccgagtgcgggaagtgcgccatttggggtactggcggacaatttgcgctacccgattttgcataaactgaaagacaggttaaatcaaacctggtatcagatccgtattggcgatcgactggcctatatcagcgcactggatgcccaacccgataatggcctgagcgtgctaacctatcaccatattctgcgcgacgaagaaaacacccgttttcgccatactagcacgaccacaagcgtacgcgctttcaataaccagatggcctggctgcgtgacaggggatacgcgacactgagcatggtgcagctggaaggctacgtgaagaataagatcaatctccctgcgcgagcggtggtgattacctttgatgatggcctcaagagcgtgagccgctatgcgtatcctgtgttgaaacaatatggcatgaaggcgacggcgtttattgttaccagtcgcatcaaacgtcacccgcagaagtggaacccaaaaagcctgcaatttatgagcgtttctgagcttaacgaaattcgcgatgtatttgatttccagagtcatacccattttttgcatcgggtagatggttatcgccgacccatattactgagccgtagtgagcacaatattctgtttgattttgcacgtagtcgccgcgctctggcgcaatttaatccgcatgtctggtatcttagctatccgtttggcggatttaatgacaacgccgtgaaggcagcaaacgatgccggatttcacctggcggtgacaaccatgaaaggcaaagtaaaaccgggggataatccgttgttactaaaacgactttatatcttaagaacggatagcctggagacgatgagccggctggtgagtaaccagccgcagggataacaatcaagcaacctgtaccggaatcgctttcgcggtacgtttcatttcattgtcgccttcaaaataggcgacgttgggtcgccaggtgcgagcttcttcatctggcatggtaacgaagctggcgatgatgacaatatcgccgacactggcgcagtgggccgccgcaccgttaacagaaataattctgctaccgcgttctgccgcgatggcataagtggagaaacgcttgccgttggtgacattccagatatcaatggcttcgttttcgagaataccggctgcgtcaagaaaatcctggtcaatggcgcaagaaccttcatagtgcaggtccgcatgagtcactttcacgcggtggagtttgccctgcagcatcgtgcgaatcataacttctacctttctaccctgtcgttaacgaagcaggcgatgcctgctttgaggaaattctcacgcagtattgcccgatttttgtttagtgtctactcatctgacggcatttgcgtcagcagtttgcgtaccgcgccgaagcgtgccatgtatcgcctgtaacgaattgatatttctctgaacgctgctcggtaaacaataaagaggtggctgacgatagcgcgccttgactggatactgccttcacgcaaagccacacggaagacagggaagatggatgcaccgagtaccacaccgcatgacgcggtatttaaacaatttttaatgcatgcggagacggctcgcgactttctggagatacatttgccagtggaattacgcgaactttgtgacctcaacacgcttcatttagagagcgggagtttcattgaagagagcctgaaaggacacagcacggacgtgctctattccgtgcaaatgcagggcaatcccggttatctgcatgttgtgattgaacaccaaagcaagccggataagaaaatggcctttcgcatgatgcgttattctatagccgccatgcaccggcatctggaggctgaccacgataagctgccgctggtggtgccgatactgttttatcagggcgaggccacaccttatccgctaagtatgtgctggtttgatatgttttacagcccggagctggcgcgacgcgtctataacagtcctttcccgctggtggatatcaccatcacaccggatgacgaaatcatgcaacatcggcggattgcgattctcgaactactgcaaaaacatattcgccagcgcgacttaatgttattgcttgagcaactggtcacgctgatcgacgaagggtacactagcggaagtcagttagttgccatgcaaaactatatgctgcaacgcggtcatactgaacaagcggatttgttttacggtgtgttgagagacagggaaacgggaggggagtctatgatgacgctggcgcagtggtttgaagagaaagggattgagaaggggattcagcagggaagacaggaagtaagtcaggaattcgcccagcgtcttctgagtaaaggaatgtctcgggaagacgttgcagagatggcaaatttacctcttgctgagattgataaggtaattaaccttatttaagttacctgtgttatgacagatgacgtggggtaaattaataactggcgccatcagccgtagcgccagttaagtattacgccagctcgaccattttgttgtcgatcaggcgagcatcgccaagccaggcggctaccagaattactgcccgtttgctggtttcagaaacttccagcaatgtgtcggcatcgcgaatctgaatatcatcggcgcggaagcctttttcattcagttcttgccccgcaatggtaataatttcatcgagatcccgttccccagcctgcaatttgtcagcaatgctacttaaaactttgtacagaccaggcgcaattttgcgttgttccgccgtcagataaccgttacgggaacttagcgccagaccgtctttggcgcgcataattggcacaccgacaatctcaatatcgaagcccatatcggcaaccattttgcggatcagcgccagttgctgaaaatctttttcaccgaagcaggcgatgtccggctggaccaggttgaacagcttgctgacaatagtgctaacgccgcgaaaatgtcccggacggctggcaccttccagcatggtgctaaggccaggaacgtcaacgtaagtgtgggtttcagtaccgttcgggtagatctcttttacgctaggggcgaaaactaaatccactttacgtttgtttagcttctcgcagtcctcctgcaaggtccgtggataacgagccagatcttccgggcggtcgaactgcatcgggttaacgaaaatactgacgacgaccacatcggcgcgggctttggcttcgtcgaccagcttcatatggccatcgtgcaggttacccatggtaggcaccagcgccacgcgcttgccttccatacgcaggcggcgaatttgctgacgcagcagcggcagggtttcgataattaacacaacgtgactccttaatggaaactgtgttcttcgcccggataaacgccggactccacttcagccatatactgccgcacagccgcgcggatgtcgcccgtttcggcgaggaaatttttagcgaatttaggaatgtgaccgccggtaataccaaaggcgtcgtgcatcacgaggatctgcccgtcagtgacgttgcctgcgccaatgccaataaccgggatcgccagtgcttcggtaatacgttttgccagttcaaccggcacgcattccagcaccagcagctgtgccccagcagcttctaaggctaatgcatcgctgagcagttgatcgcccgcttcatcgccgcgcccctgaactttgtagccaccgaaaatattcacactctgtggtgttaaacctaagtgaccacatacaggaacggcacgttcggtcagcatttgtacggtttctaccagccactcaccgccttcaattttgaccatgttagcaccggcacgcataaccgttgcggcgttttcgaaggcttgttccggcgtggcatacgccataaacggcaggtcagccagcagcaggcagtttggtgcgccgcgacgtacggcggcagtgtggtaggcgatatcggcaacggtaactggcagggtggagtcgtgcccctgaaccgtcatgcccaggctatcgcccaccagcatgacgttaagcccttcatcagcaaagagtttggcgaagctatagtcataagcggtgatggtcgcgaaacgttttttttcctgtttgtacttctgcagtaaggagatggtggtcggtttcataacgtatcctgataaattgatgttgtgctgtctggcattttatcagtcacattggtgggggcaatgatttatccgtagcagcactgccagaaggtgacagtgctgctacgttatcagggataggttacctggaaagtactggtggctttaaattcgccgggttcgatagcaatattcccgtcttgctttaatgttgcctggaaatgaagaggctgacttgtgccgttaccttgattagggtaaaccccatcggaggtgtcatcttcggtttcataatctatataaacagaattcgtatcattaggttttaatgtcattagcggatttttactggttgctaaaccttcaatgagtacgccaacgcctttggcggcagtgcttccagtaagcgtattaccaagcagttgtgtgttttgagtacctacttttccagtgacgagttttgtttcaatattacgcacacgaatacaattctgaaggctgatatcaaagggaacaggactagcgccatttttaattgtcccagagctatattctcccattctaaccgtactaccattgacacttggcccggtaagtatggaggtaaaacatgttggtaaggttaatttgacattattcagtgtgaaattgacataaatgtggttgctgtgatctacaacttttgtaccaggactgtaggccttaaagctataaaggtaattactactactggataactggacttgctgattaagtgtaggatcgaaattagtatctgtataaaattcaacagttatgttgtgtactataccaccaatagcccaaaacttatcgtagtcgtctgctttgttgcaacccttagtttgtagatcgctgtctgtgacggaaaagaaaaattcttggttggaaggatctccgatatagattcctgggctttgaatgtcagttattgtatcgtatgcagaccagaccctacttattaacatggtgtaatacagaccaggaacagatgtattaaatagtttatgtccgccataatctttaccactatagaccatggcattttcaatagttattggaccaggattcgctctgccagatgtattgcagtaaagaataccaccaccggtacctgtatccaggtaactccagtacatttttaccccagtcgggccgagctgcgtgggtttataaaaaaccaagttgcttgctgtacttgtgtaattaaaggtcatctgtgcggcagtggaggggcctcgatagttatcaactcctgcattatttcccacaataaaacttgtatatgcactgactgtattacaacaagaatacagtgctaaaaaaagaatgtacctgaagatagtcttcatttttactccaatgtttctttattgttatggtttgcgctgtttttgtttgttattcgtagtaaatatccactaacacatggctcataagttgaccagatgtaacactcaatgcaggatcgattttttgcattcgggtgctaaatttccaggaactaccattcatgtcatcgctcattactggataaacggaacgagatccgccactagcattaagaacattgaatgtattcgcgctatcctgagtagaaaatataactactcctacattacttgctccactgctaatttcattagcaaatatttgcctagagccagcagccatgacaccgctaagggctctaaaatcaatatgtaactgatttagcacatcgccagttccctgtaatgcacagtcggatacagtgatagtgaactcttttccacctggttgataactttcaggagtaacattaccactaaaatatcccaccccaacgacgccaagatcaatattaccctggttactgattccgcttttgcaggtgctgttttttacattggcaacaaggtcaatatcctgtccagcaatggctggacaggcgatgcaaaacagtaaactcagaaacagaattattctcttcatcagcttacgttgagtgggatgcatatatagttcctgaatctgtaagtctgttagttataggttactgtaaatgtggctggtgcagaaaacttacccgcagtgacattgtttacggttttatttttttccacgaccaggcgtgcactcatcggataataaacgaccgcattggctgcagtggagattgttacctcttgacttgctggtgttacacagctaaattgtgttgcactccctgttgccggagttacagtgctccagacttcaacggcgacagcacttgctttatctgcggctgtggaaccatttgcaaaccccgcaccgtcattagcagttccctcgcatgtggctcgcttggttaattttatttgcgcttttttattggggatacccgcacagtctttgaatttgagtttgaatgtttttactttggtcttggcattgatttcagaaatatatacatcaccaaaatcaacaacagaaatgtcctgatcagagtcatttactaatgtagcggtacaagtacccatttctacagtagtaataacggtcagtccaatactgtctgttgccgcataagagagtacgctgaacaaactggcagccaaaacgacactgctggataatccataacgtaaatttttaaatgtcatcataattatccttcttattgatagatgaaattaaacgtcgccagtgcacgaaaattccccggtacgccttgccctgcatctgtttcacgtagcgcaacggtcatttcaagacccttatcgggctgcatctcgtctgtgctccagcgtatcttttccgcactgttaggtttaaggaaagtggcatcatcagtagtccgttttttgaaacccataccgatattacttgtcgtgctagaactatcaccagactgcggtataataagcttaggactgctactacttgcatttccggtcagagtggtatcaatccaactgatgccactgctgcacccactggcaaccagtttaaaatcagcctgagattctgtcgttttattcgcgatcttatccagacccatcttagggattctcaatgtgtagttattattgccatcattcgtgacgttattaccagtaagtgtgatgttacaggttgtcgctttgacagtggctgtaaactctacattaatatccgttgcaaatacactgggacttaataatattcccatcagtatcactattttatgtggcgttgtttttatcatttgacgtcccttgtagttactgaatctgacaccgaattccattcagaataatagattgtgctattttttctgcttctgggctttgttgataatgcgcaagacaacttacgggtttactttgttcgagccatttaatgctgatatttccctgctgctcaataccacgaacaaatgcttgtccaccctgtccaacattaccaatgacattgccttgctcatcataaatatctgcagcaaatggaatatttttaccatcacttcgtgtgatgttcataatggcactttgcccttgcacggtttcaaaatcagcaaagacgacactaccctgacgcggtacagctactgcactggtactttttaattcaacatcgttctcaagatcgttgatatccagcgcgatacggttttcatgataaggagaaagagcgctggtgacaccataaccccatcgatcgatagtactgttgccataatttattcgcgctccttgagcacctggagcctgaactaccgccagtgtatcggagtcgctaaaactatcattactgaaagtcagtccaccgctatgcaatacaaaaccaccgtcggtgctgagagaaacttgacggctgttatcgctatttgcagaaatactacctgccagcgttccccatggactctcatagctggcataacccccaacataactcaaatctttgctggctttattcatcgtatagccagtattcacgctataactgacgcgagcgttatcgctatagccactgctgctaacgttgagttggttattacccttaaagtcactgcttatttgagtatcaatactctggaaaccactagtacgttgttcagtgccaagtaatttttcaattggaatggtgaaactaagataaacgctatcgtcagtgtcgccgtcttcattccaactacgctgggcactgacactgtagctgccccaggatgtactgttactgtagccaatagagtaattgctacgattttgtccggaagcccagtaatcggaccaacttccggaaagataaaaactaccgtaatcttttttctcaaatttcaacggttggttaatactgaccgtaacctgatttttcatgcgactgtaattacgcatggatttcggttcaagatcttgttcgggatgtttcacttcatcaattagagttagtgcatcattaagaccaaggtaattctgtgtgctatagcgataggccgcgatattcagactagtacttgtttcttcgaataacttgttccaggaaacacgataactttgcccctggtatgttttatcatccgggatacgaacattggaatgagtcacatcgaaagaaaatgcaccaacactagtattcagaccaagacctaacaaaccagcggtatagttattatcggttatctgaataccggtataacccgtcagatagttattcaggccgtagtagtagcttgcttgaaataaattaggctcatcctgaatatcatcttttaagacctgaccgccgctaatatcccaacgtccaacgccagggcgtaacatttgaacaacggaactgaaaggttggctgaatgtccgcttactgccatcggattcttcgatggtaacaataagatcgctgccgtacccactcggactcagatcatcaatgacgaaagcgcctggcggcaccgtcgtttcataaatcttatagccaccttgcgtaatagtgactttggcgttggtattggcaacgccatgaatgataggcgcaaagctggctaaagtcggaggcaacatgcggctgtcactgtataaacgaatgcctcggatactgacggaatcaaaggtttcgcccgtcgtataagactcaccaagaatgagttgagaacgcaggctggcgatatcacgctgaacataccgattcttaaaatcataattactgccagaatcggtcatccagttgtagttgccgctggcacgcagtcgccatgcacctaaattcatcccaccgttaaatgcagcataaatgctttcattttttcgaccaggggtttcactatgatatccgttgaggttgtaactcaacatggccgcattaatgccgttttcccataagcttggatcaacatagttttggtaatttttcattacccaggcttgaggaacgtctatatccagacgttgatcgttaacgtcataacgaacagaagcctgagggataatttccgtcaaattgaggcaattgccgagcgtttcatccctggcaagcagaacggctttttcgttatttatatcgggagaattaatatgaaactgcaataaattctttaatgtgatacaagcctgggcgttcttttttccttcaattgcgacaaatgtaatactttggttaatgattggttggtcgtttacataaacactgacgtcgtaaacacccggtatagcggggttaccttcactgtaccggctgagatcaatattagatgcattctgccccatcaggaaggtatggtcatattcaacgagttcagcactgaaagcagtattgcaatacagcagcgcgcaaaacgtggcgatacgggtcagatgatgataatttttagtatattctatagtcacgctatgcttcctgcggaattatatccttgcctgattacagcctggcattaccttcaattgcgccaccaaagtcattaatggcgtaaaaatgcacttttgcagaattcgctttgccattaaggccattgactttcatgacctcatcactaaatggtgcaatcattttcacatcaatcggatagcgtttaccgctagcttctaaatcaccactgctaaaagagacgtagtaaggggttggattggtcactcgtaaactcgccttaccttcactaccactccagaaccacttcagggctaacggggcttcagagggatttcccttcaatccatccgggcgatagaaaagttttatacgtgtgcgaaatgccagttgcagcaggctttgattcgcgaccttttctgcatctggttttggtggaacttccagtacgttaaaccagaacacgctctctctgtctttaggcagactggtgctggctgtgtacattaatttgattgtttgcccacgtttggcatcaatacggcttactggcggcgtagcagtaaaagggactgtaatactgccaggctcagcgttgtcatcgccagtatctaaccaactctggacaagcaacgggttattccctttattttccagacgtacgttgacacttttttgatcgcttttatatattacgcgagtaccgctaatgacaatgtccgcaatagagctactactaaaagccatacaggttacgaagcataaagctgttgtatgtttggtgttaaaaaacataaaccatccctgatagagttaattaaaacagggaataatataaaatagaaattattattccctgtatattcattcaatcaatttaactggtgaatacttactgataagtaatggtgtatgcagtgttagtttttacataaccagcagttgctgtttggtctgcgacggcacgaacgtaagacgctttaaaatcataaacagcagattttgtcgttgcatccagggctttagtatacacatcgccagggttgttaatttgaacctgtttgatagtggaaccatcaatattgtgtagagcgatattaacgccgtcagatgggttgttaatagacatgtcgttgttcaaagtccctttgctgttaccaaagaaaacagaaccgaaggtcattttagccgtgctacctggattcggatttgctttgctgcagtcaacggtgatgctgaaaggtttagctttagcgccaacggtgtcattcagtacgccagcatcgatttcaccaacggttgcggtttgcagcaggatcagaccatccttgttaccgccgtcaacgcgggtttcacaggtgttatcaacaaccagaccactgatatttaactgaccgccgtccatatcagcagaagcagtacctgcaaccatcgccagcataagaccagacagggcaaaacctaattttttagacataaaaatcctttaataaaattccattagtcagactacatgtttgaagaatgactattcatgacacaaataggagaaacaaatgttagatattaatgagcaatgatatttgttacccaaatttacaaccattgttcattaggtcgcctattgtgcactttagaagcttttgaacaaattaaatttacttaattcaaaattaagtaaaaataagttcacaagtgcaattggttagggtatggagatgggattgatatttatttataggaagttatattatttccgcaaagagatgtttaaactaaaatcgtaattaaggaaagagatgagatatgattttcagaaaatatttatattcgcaatataaataaattaccatttgtttaatttgtcaaatgctcttgtatgtaagatttgacgcaacatctccccatcaggaaacaccaactccggcgcgatttcaaacagcggccacagcataaatccacgattcttcatatcgtagtgcggaacggtcaggcgttcagtatttatcacttcattaccaaacagcatgatgtcgagatccagcgtgcgtggtccccagcgttcagctttgcggacgcgaccttgctgcaattcaatacgctgtgtgtgattgagtagctcttcaggtgcaagagaggtttccagcgccacggctgcgtttaagtaatcgggttgatcttgcggccccagcggtggggtgcggtaaaagctagaaacggtaagaatgtggctttcagggatatcgcctaatgctttcagggcagcattgacctgctccagcggagaggccagattgctgcctatggcaatatacgccactgtcatgcggtaccctcacgacgtggtgcgcgtttgcgtggacgacgagtacgacgacgcggactcggttcttcatccagctcgttgagcatccctttttggtctggtggcgcggaaacctggaactcaccccaccatttcaccagacgctgcagttcagcgttacgctcaacttcagctcgcaaggccaacaggtcataagccgcacggaacttaggatgctccagcagtttccatgcgcgtttaccctgacgacgggacatacgcaactgcaactgccagatatcgcgggttaatgtcgtcagacgtttcgggattgccagactacggcaggcttcgtccagcacgtcgttcatcgccagcgcgaaagcgtcgtgataggtcaggccgctttcctgggcgatcttctgtgccgtctccagcagtgggtaccagaacatggcggcaaacaggaacgccgggttcacgcgcatatcgttatggatacgcgtatcggtattcttcagcacctgttcaatgatccgctccatcgggctgtcgccattttccgtgaagtagcgggtaatggtcgggaacagcggctggaacagatgatattcacacaacagcttataggtttcgtaaccgtagcccgcttgtagcagtttaaggctttcttcaaacaggcgtgccggtgggatatcgttcagcagggtagcgaggcgagggatcggttctgcggtttccgggctgatgcgcatacccaatttggcggcaaaacgtaccgcgcgcagcatacgtaccggatcttcacggtagcgcgtttccgggttaccaatcagacggataacgccgtccttcagatccttcatgccgccaacgtaatcacggacggtaaaatccgctacgctgtaatacaggctgttgatagtgaaatcgcggcgctgggcgtcttcttcgatggagccgaaaatgttgtcgcgcagcaacatgccgttttgcccgcgttgggaggtcgtgcggtcgctgacgttaccttcgtggtgtccacggaaggtcgcaacttcgataatctccgggccaaacattacatgagccagacggaaacggcgacccaccaggcggcagttacggaacagtttgcgcacctgctcaggcgtggcgttagtggttacgtcaaaatctttcggctttttgccaagtaacaggtcgcgcacgccgccgccaaccagccaggcttcgtatcccgctttattgagcctgtacattaccttcagggcattttcactgatatctttgcgggaaatagcatactgctcacgcgggatcaccgtcacctgtggacgggcgactgcctgttcagcctcgctttcctcgcggcttagcaccttgcggcaaaaattagcgactcgggtaaaaatagtacacctcggtagtgtcaaacatcattcaggacaaaaaaatagcggctaatcatagctcagcaactcgcattactgaatgtactatttacaattgcgctctcgggcacggcggtaagccgccagtttttgacggcactctgaaggatttgctcgacgctgaaatcctgccagtgtgcttctgcctgctgccccagaaattgaagtgccgcgattagtaccgggcgtggatcgcctttcggcaacgcaggcgcatgattctgcttggaaagtttagcgccttgtggattaagcgccagcggcagatgaatgtaatctggcactttccagccaaaaagctggtacaggctgatttgccttactgttggttcaatcagatcagccccacgcactatttctgtaacgccctggaaatgatcatcaaccacaacagccaggttgtaggcgaacaacccatcacggcgatgaatgataaaatcttcccgtgccagtttttcgtcggcgtgaataatgccgcgcagctggtcagtaaattgcgtgaccggatgctgctggcggatacgcactgcggcgttgtctggtccatgatgcaacacccggcaatgaccgtcgtaaataccgccaatgctttgaatacgcgcacgcgtacaggtgcagtaataacttagtccttgttcatgtaaccaggcgagtgcttcacgataggcgtcgtgacgttggctttgccagagaacatcgccgtcccagtgcagaccgtaatgttccagctggcgcaggatagtttctgcggcaccgggaacttcacgaggcgggtcgatatcttctatgcgtaccagccagcgaccttgccgggcgcgagcctgcaaatagctgccgagcgcggcgatcagagagccaaaatgaagctcgccggaaggagagggggcgaagcggccaatatactgtgtgtctgtcatctctttgaacaaaaaataaggcgggagcatttcccgcctgtggtaaacgtgatggaacggctgtaattagccagccatctgtttttcgcgaatttcagccagcgttttgcagtcgatgcacagatcggctgtcgggcgcgcttccagacggcgaataccaatttcaacaccgcaggattcgcagtagccgaaatcttcgtcttccacttttttcagcgtcttctcgatctttttgatcagcttacgctcgcgatcgcggttacgcagttcgaggctgaactcttcttcctgggctgcacggtctaccgggtccgggaagttggctgcttcatcctgcatatgtgtaacggtgcgatcgacttcatccctgagttgattacgccatgcttccagaatacgacggaagtgcgccagctgggcttcattcatatactcttcgcccggcttctcctgatatggttccaccccagcgatggcgagaatactcagggagcttgttttacggttttgcccttcttgcatgttgcttctccttaacacgcactatcgatccccatgttcgggggaaaaatgaggccgctataaatagcagatgcttttccggatagcaattatctaaacgtaacacttgacaactgtgtgaggaaaagcgtatttgcgcacgcgaccagaatgtaaattaaccagttacttactttattacaatgtaaccggcagactttttttaagagccatgccttcagcagaaatttccgctttgtaagccagaatttctacccccctctgttgagcttcactcaatagttgcgcgtatttctcatcgatgtggcgcgcgggactaaaccgtgtaatggcactatgcagcacggcgaaaaagataaccgcacgctggccttcagccgctacgctcatcaactcccgaaggtgtttctgacctcgttcagtgaccgcatcgggaaaatatccctgttcgttctccgctaacgtaacgcttttcacttcaatatagcagtctggacggctatccgcctgcaacataaagtcaatacggctgcgttctgcgccgtattttacttcgcttttcaggctgctatagccactcagttcactaatactttcattaaggatagcctctttcgtcaacctgttagcccaaagcgtgttgacgcaaataaatgcgccgctctggctttgagttaattcccaggtgtgtgggtatttccgtttggtgttgtcactagtgctataccagacggtatcgccaggcgttgcacaaccggtcatcgcacccgtattcgggcagtgtagcgttaattcgcgaccatcgggtgtgatcacatcggctaaaaaacgtttgtaacgctgaattagcgtcgcgcgctgtagagggggagaaaattccattgcgacaatccttgttattgcgttagcgcccagcgttttagcggcgtgtagcgtgtgcgtccacgggcaaagctggaggcgtaaagggtgaactccgtcaccgcatagctccagttaaaacctggcggcgggattgtcaccgcctcgctggcgtcgcgcaataaggtaatatgtggatgaaacggacgattgctttgaaaacaaccgctgcgggcagcctgactacggagcatattcgccagctggattaagccgcgtggcggctgacgcatccctaaccacaccacacggctacgcagccattgtccggcgtcatcaagcgtgagtgtgaaaccaggttgacgaatccgtccggctaaaagagaaagcgccttctctttctcggcgctcacttcgcctaaaaatgccagagtcagatgcaaattatcggcggcgaccggacgtcccgcctcaggtgggaagtgtgtggcgcgccaatggataatctgttcgcggatttctgcaggtaagtcgatagcaaagaacagacgttgcggttcagacatgtgaggcactcggttatgaattaccgcgatgctacaatgtggcgcgaagaatgttaaccctctggagcgttttgtgagcagcttgcccgttgctgccgtcttacctgaattacttaccgctctcgattgtgcgccgcaggtattattaagtgcgccgaccggggccgggaaaagtacctggctgccgctgcaactgctggcgcatcccggcattaacgggaaaattatcctgctggagccgcgtcgtctggcggcgcgtaacgtcgcgcaacggctggcggagctgcttaacgaaaagccaggcgataccgttggctaccggatgcgtgcgcaaaactgcgtcgggccgaatacccgcctggaagtggttaccgaaggcgtgctgacgcgcatgatccagcgtgacccggaactgagcggtgttggactggtgatccttgatgaatttcatgagcgcagcttgcaggcggatttggcgttggcgctgttactcgatgtgcaacaaggtctgcgtgatgaccttaaactgctgattatgagcgctaccctggacaacgaccgcttgcagcaaatgctgccagaagcgcctgtcgtcatcagtgaagggcgcagctttccggttgaacgccgttatttaccgctgcccgcgcatcagcgttttgacgatgccgttgcggtagccaccgctgaaatgctgcgtcaggaaagcggaagtttactgttatttttacctggcgtcggagaaattcagcgtgtgcaggaacaactggctagccgcatcggcagtgatgtattgctctgcccgctgtatggcgcgttgagcctgaacgatcagcgaaaagcgatcctcccggcaccgcaagggatgcgcaaagtggtgctggcgaccaatattgctgaaaccagtttaaccattgaaggtattcgtctggtggtggattgtgcccaggagcgtgtggcgcgttttgatccgcgcacggggcttacgcgactgattactcaacgcgttagccaggcatccatgacgcagcgtgccgggcgcgccgggcgtctggagccgggtatcagcctgcatttaatcgccaaagaacaagcagaacgcgccgcggcgcaaagtgaaccggagatcttacaaagcgatctttccggtttgctgatggaattactgcaatggggatgcagcgatccggcgcagatgagctggctggatcaaccgccagtagtgaatctactggccgcgaaacgtctgttacaaatgctgggggcactggagggtgaacggcttagtgcgcaagggcaaaaaatggcagcgctgggtaacgatccgcgtttagcggcaatgctggttagcgcgaagaacgacgacgaagctgctaccgcggcaaaaattgccgccattctcgaagagccgccacggatgggcaatagtgacctgggcgtggcgtttagccgcaatcaaccagcctggcagcaacgtagtcagcaactgttaaaacgcttaaacgtacgtggcggtgaggcagacagtagccttatcgcgccgctacttgccggggcgtttgccgatcgcattgctcgtcgccgtgggcaagatggacgctatcaactggcaaacggcatgggagcgatgctcgatgccaacgacgcgctaagccgccacgaatggttgatcgcaccgttattattgcagggcagcgccagcccggatgcgcggattttactggcgctgctggtcgatattgatgagttagtacaacgctgcccgcagctggtacagcagtctgacactgtggagtgggatgacgcgcaaggtacgctgaaagcctggcgtcggctacaaatcggtcagttgacggtgaaagtgcagccgctggcgaaaccgagtgaagacgagttgcatcaggcgatgcttaatggcatccgtgataaaggtttaagcgtgctcaactggacggcggaagcggaacagctacgcttgcgtttgttatgcgccgcaaagtggttgccggaatatgactggccagcggttgatgatgaaagtttattggcagcgctggaaacgtggctgctgccacatatgactggcgtacatagtctacgcggcctgaaaagtctcgacatttatcaggcactacgcggattacttgattggggaatgcagcaacgtctggatagtgaattgcctgcgcattacactgtgccgacgggaagccggatcgccattcgttatcatgaagataacccgcccgcgctggcggtgagaatgcaagagatgtttggcgaggccaccaatccgacgatcgcccaggggcgcgtgccgctggtgctggagttgcttagtcctgcccaaaggccattacaaatcacacgagatttgagcgacttctggaaaggagcgtaccgtgaggtgcaaaaagagatgaaagggcgttatcccaaacatgtctggccggacgacccggcaaatactgcaccgacgcgacggacgaaaaagtatagctaaggttggttttctccctctccctgtgggagagggccggggtgagggcatcagcgcgcacgttcaccctcaccctaaccctctccctcaagggagaggggaccgatcgagcacaaattttgagagatatcttcttctgtcttgtaacagaagaacagaaaatcgggcttttgcgcctgaatattgcggagaaaaagcatggccgggaatgaccgcgagccaattggacgcaaagggaaaccgacgcgtccggtcaaacaaaaggtaagccgtcgtcgttacgaagatgacgatgattacgacgattatgatgactatgaggatgaagaaccgatgccgcgcaaaggtaagggcaaaggcaaagggcgtaagcctcgtggcaaacgcggctggctatggctactgctaaaactggctatcgtttttgccgtgctgatcgccatttacggcgtttatctcgatcaaaaaattcgtagccgtattgatggcaaggtctggcaactgcctgcggcagtttatggccgaatggtcaatcttgagccagacatgaccatcagcaagaacgagatggtgaagctgctggaggcgacccagtatcgtcaggtgagcaaaatgacccgtcctggcgaatttaccgtgcaggccaacagcattgagatgattcgccgtccgtttgatttcccggacagtaaagaaggacaggtgcgcgcgcgtctgacctttgatggcgatcatctggcgacgatcgtcaatatggagaacaaccgtcagttcggtttcttccgtcttgatccgcgtctgatcaccatgatctctagcccaaacggtgagcagcgtctgtttgtgccgcgcagtggtttcccggatttgctggtggatactttgctggcgacagaagaccgtcatttttacgagcatgatggaatcagtctctacagtatcggacgtgcggtgctggcaaacctgaccgccggacgcacggtacagggtgcgagtacgctgacgcaacagctggtgaaaaacctgttcctctccagcgagcgttcttactggcgtaaagcgaacgaagcttacatggcgctgatcatggacgcgcgttacagcaaagaccgtattcttgagctgtatatgaacgaggtgtatctcggtcagagcggcgacaacgaaatccgcggcttcccgctggcaagcttgtattactttggtcgcccggtagaagagctaagcctcgaccagcaggcgctgttagtcggtatggtgaaaggggcgtccatctacaacccgtggcgtaacccaaaactggcgctggagcgacgtaatctggtgctgcgtctgctgcaacagcaacagattattgatcaagaactctatgacatgttgagtgcccgtccgctgggggttcagccgcgcggtggggtgatctctcctcagccagcctttatgcaactggtgcgtcaggagctgcaggcaaaactgggcgataaggtaaaagatctctccggcgtgaagatcttcactacctttgacagcgtggcccaggacgcggcagaaaaagccgccgtggaaggcattccggcactgaagaaacagcgtaagttgagcgatcttgaaactgcgattgtggtcgtcgaccgctttagtggtgaagttcgtgcgatggtcggaggttctgagccgcagtttgcgggctacaaccgtgcgatgcaggcgcgtcgtagcattggttcccttgcaaaaccagcgacttatctgacggccttaagccagccgaaaatctatcgtctgaatacgtggattgcggatgcgccaattgcgctgcgtcagccgaatggccaggtctggagtccgcagaatgatgaccgtcgttatagcgaaagcggcagagtgatgctggtggatgcgttgacccgtagcatgaacgtgccgacggtaaatctggggatggcgctggggctgcctgcggttacggagacctggattaaactgggcgtaccgaaagatcagttgcatccggttccggcaatgctgctgggggcgttgaacttaacgccaatcgaagtggcgcaggcattccagaccatcgccagcggtggtaaccgtgcaccgctttctgcgctgcgtagcgtaatcgcggaagatggcaaagtgctgtatcagagcttcccgcaggcggaacgcgctgttccggcgcaggcggcgtatctgacactatggaccatgcagcaggtggtacaacgcggtacgggtcgtcagcttggggcgaaatacccgaacctgcatctggcagggaaaacagggactaccaacaataacgtagatacctggtttgcgggcattgacggcagcacggtgaccatcacctgggtcggccgtgataacaaccagccgaccaaactgtatggtgccagcggggcaatgagcatttatcagcgttatctggctaaccagacgccaacgccgctgaatcttgttccgccagaagatattgcagatatgggcgtggactacgacggcaactttgtttgcagcggtggcatgcgtatcttgccggtctggaccagcgatccgcaaagcctgtgccagcagagcgagatgcagcagcagccgagtggcaatccgtttgatcagtcttctcagccgcagcaacagccgcaacagcaacctgctcagcaagagcagaaagacagcgacggtgtagccggttggatcaaggatatgtttggtagtaattaacatctaagcgtgaaataccggatggcgagttgccatccggtaaaataacatcccatctaagatattaaccctttcttttcatctggttgtttattaacccttcaggaacgctcagattgcgtaccgcttgcctgtaagactcaatgtaagccgtgccaaaatatgatggctaggacgagctagaacccgccagcgtttcgaatattatcttatctttataataatcattctcgtttacgttatcattcactttacatcagagatataccattccatataacggccctgtacgcctggacggataaagcgtttacgcgacaacggatgcccgatgcgacgctggcgcgtcttatcgggcctacaaacggccccgaatcgtaggtcggataaggcgttcacgccgcatccgacaaaccatgctggatcacaacttcgcaaacacccgacgtgcagcatcgatggtgttattgatatcttccatgctgtgcgccacggacataaagcccgcttcaaacgcactcggtgccaggtaaacaccttcgtccagcatcatatggaagaaacgcttaaagcgttccacgtcacaggccatcacatcctgatagcacgtcacggactcggcgtcggtaaagaaaataccgaacatgccgccaacgtggttaacgaccagcggaattccggcttcttctgccgcttccagcagaccttctgccagacgtgttgtcagctcatccagcgtttcgtgaacgcccggctgcgcgacttcattcagacaggcgaaacccgctgccatcgcaatcgggttaccggaaagcgtacccgcctgatagaccggacccgtcggggccagcgcatccattacatcacgacgaccaccgaatgcgcctaccggcattccaccgccgatgattttgccgaggcaggttaaatctggcactacgccgtaataatcctgtgcgccagctagcgctacgcggaaaccggtcatcacttcatcgatgatcagcaacgcgccaaattcgtcgcacagcgcgcgcagacctggcaggaactctggcagcggcggaacacagttcatattgcctgccaccggctcgacgataatacaggcaatctcttgcgggtattgctcaaatgcggcgcgtacagaagccagatcattataagtacaggttaaggtatatttggcgaaatctgccggaacgcccgggctgtttggctggcctaacgtgagtgcgccagaaccggctttcaccagcaggcagtcagcgtgaccatggtaacacccttcaaatttaataattttgtcgcgaccggtaaaaccacgggccaggcggatggcgctcatggtcgcttcagtgccggagttcaccatgcgcaccatatccatggtcgggaccagttcggtcaccagttgcgccattttcacttccatttcggttggtgcaccaaagcttaaaccacgctcggcggcttcaatcacggcattgcggattgccggatggttatggcccagcaccatcggcccccaggaaccgacataatcgatataggctttgccatcaacatcgtacagataagcgccgtccgctttttcgataaacagtggagtgccgcccacgccagtaaaggcgcgaacaggggagttcacaccgccagggatcagctcgcgcgctgcgctgtaaagattttcagacttactcatggagggttcctgattcgtagaaaaagtgaatggctgctattctatgttattcataacaagttaaatactcgtcaaacatcaggctgcttgtactggtgcaatcctgatttcttagagtataaaagttttgtgcatttgaaacattacgctttgcaaaggattttcatggaacgtgcgagtaaaatgccgtcatcttatttgtatgaccaataagtgatcattggatgaaaactgatactccctctttagaaacaccgcaggccgcgcgcctgcgacgcagacaactgattcgccaacttcttgagcgcgataaaaccccgttagccattttgtttatggcggcagtcgtcggcacgcttgttgggctggcagcggttgcttttgacaaaggtgtcgcctggttgcagaaccaacgtatgggggcgctggtacatactgctgataattatccgcttctgttaaccgtcgcttttctctgtagcgcggtgctggcgatgtttggctactttttggtgcgcaaatacgcgccggaagcaggtggtagcgggatcccggaaattgaaggggcgctggaagatcaacgtcccgttcgctggtggcgtgtattgccggtgaagttctttggcgggctggggacactcggcggaggcatggtgttggggcgcgaagggccaaccgtgcagatcggcggtaacattggccgtatggtgcttgatattttccgcctgaaaggtgacgaagctcgccatacgctgctggcaaccggtgctgctgcggggctggctgcggcctttaacgcgccgctggcgggtattttgtttattatcgaagagatgcgtccgcagtttcgctatacgttaattagcattaaagcggtatttattggtgtcattatgagcaccattatgtaccggatttttaatcatgaagttgcgttgattgacgtcggtaaactttctgatgcgccgcttaatacgctgtggctttatctgatcctcggtattatttttggcattttcggccctatttttaataaatgggtgctggggatgcaggatttgctgcaccgtgtgcacggcggcaatattaccaaatgggtgctaatgggcggtgcgattggcggtctgtgtggattgctggggtttgtggcaccagcaacgagcggcggcggttttaacctgattcctatcgctaccgcggggaatttcagcatgggaatgctggtgtttatcttcgtcgcgcgggtcattaccaccttactctgcttctcttccggcgcgccgggcggtatttttgccccgatgctggcgctgggtactgtgctgggaaccgctttcggaatggttgccgttgagctgtttccgcaatatcaccttgaggcggggacgtttgctattgccggaatgggggcattactggcggcatctattcgcgcgccgttaacggggatcattctggttctggagatgaccgataactaccagctcattttgccaatgattattaccggtcttggcgcaacactattagcgcaatttaccggcgggaaaccgctatacagcgcgattcttgcgcgcacgctggcaaaacaggaagctgagcaactggcgcgaagcaaggccgcaagtgccagcgagaatacttgaacgaaataccagggtattagataatggcgattattattgggttagaatttgcccaattgccgatgtcgtttggagcaaaatatgagtgatgacgtagcactgccgctggagtttaccgacgcagcagccaacaaagttaaaagcctgatcgctgacgaagataacccgaatctgaaattacgcgtgtatatcaccggtggcggttgcagcggcttccagtatggtttcacctttgatgatcaggtgaacgaaggcgatatgaccatcgaaaaacagggcgttggcctggtggttgatccgatgagcctgcaatatctggtcggcggttccgttgattataccgaaggtctggaaggttctcgtttcatcgtgaccaacccgaacgcgaaaagcacctgcggttgcggttcttcctttagtatctaatctgttgttcatgtgccggataaactatccggcacatcttctctcttcaacgcccattctcatccagcgcaaacgtcggtagcttaagatgccaacgaatagccgccagccgaatcaatagcgtcacgaccatgcccatcatactggctgtttccagtggtacggaaaatgtgtaataagccgtagcgtggacaataccgccgataatacaggcagttgcgtagatttctgtacgtaaaatcatggggatttcgcgggccagaacatcacgaatgatcccgccgccaacgccagtaatgacgcccatacaaaccgcgattaacggaccggcttccgcattaaaggctttattcacgccaatgccgacaaacaccgccagaccaacggcgtccagcaccggcaacatccattttggtaagcgtcttggctggcgcaccagcacgatggtcagcatgctggtgaccattgcaacgaccagatcggtgggatctttcacccaaaataccgggccgtgatccagcgccatgtcgcgaattgtcccgccgcctactgcggttaccacgcccagtaccagaacaccaaaagggtccatacgcaattttccggctaacaaaacgccggagatggcaaataccgctgtgccgactatatccagccaatagacgagcattgttcaatccccactgagcacctgaaaaggtcaggcgttaatctacctgactaagcgcattacagagctgttgtgcagcgaggataatacgtgggcttgcacgttcaaaccagtcactcgtgagaggaataacgggaattttgagctgttcaccccagtattgtttgattttaggaatttggtccggtccgcctgtaatgacaatcgcctgtgggctgcgtgctaacacctgttcgcggctaacttgcggccagggaacccggctgtctttaaagatgttttctccgccacaaacttcgagtacctggttctgaatgctctcttttccactggtaaatggcggattaatgccgaattgcagaaaaacacgttttttaggtttatcagcatattgcgctttcaattgcgcgtactgatccagcagggattgcgcggcttgttcggccttgtctggttgcggactccagggggccagttgacgtaacgcattggcaatttgttcaatgcttgtcgcatcgacccacatcacttttattcccaggctagccagctggtcaacctgccgctcggcattacctccacgccaggcaatcaccagatcgggtttcagcgcgacaatgcgttccagattcatcccctgccaggtggaaacctgctcaatcttttgcgcttgtggaggatagtcggaatagctgctgaccccaaccggcgtgatcccggcggcaaaggcaagttcagtgttggcgggagaaagcgtgatgacgcgcggcgcggcgttgagccacagtggcgcaagaaaagacagggcgaccagcgccctgaacagactcttagccatgtgcaagtttctgcaccagactctcaaccatcaggctggactgtttagcggcaacagccaggaactcatcgaagctaagatgagactgttgatcggccacgtcggagatggcgcgtacgacaacaaacgggacgttgaaattgtggcagacatgggcgattgccgtcgcttccatctctacagcaatggcctgtgggaagttgtggcggattttcgccagaccaacagaaccgttgatgaaagcgtcgccgctaacaatcaggccacgtacagcgttaagattcagttcggcaatgcaggcctcagcggcagcgatcagtttatcgtcagctttaaagcctgccggacagcctggtaactgaccgtattcataaccaaatgccgtgacatccgcgtcgtgataacgtgcttcgtcgctgacaacgatatcgcccactttcaacgttggtgccaggccaccggcagaaccggtgttaataatcacatctggcttgcagtgttccaacagcaaagtggcacccagcgccgcagcgactttaccgatgccgcttttcagaagcgcaacctcggttccattcagttggccggtatagatttcgcaaccgccgagactgatagtttgacggttttcgattttgtcacgcagcagcgtaacttcttcttccattgcaccaatgatgccgattttcatagatttactcgcgataagcccgatttgaaggcatagtttaccatgcgcttacggggaagcgtatttctcacgcgggagaggacatggcacagattgatttccgaaaaaaaataaactggcatcgtcgttaccgtagtccgcagggcgttaaaaccgaacatgagatcctgcggatcttcgagagcgatcgcgggcgtatcatcaactctccggcaattcgtcgtctgcaacaaaagacccaggtttttccactggagcgcaatgccgccgtgcgcacgcgtcttacccacagcatggaagtccagcaggtggggcgctacatcgccaaagaaattttaagccgtctgaaagagcttaaattactggaagcatacggcctggatgaactgaccggtccctttgaaagcattgttgagatgagttgcctgatgcacgatatcggcaatccgccgtttggtcattttggcgaagcggcgataaatgactggtttcgccaacgtttgcacccggaagatgccgaaagccagcctctgactgacgatcgctgcagcgtggcggcactacgtttacgggacggggaagaaccgcttaacgagctgcggcgcaagattcgtcaggacttatgtcattttgaggggaatgcacaaggcattcgcctggtgcatacattgatgcggatgaatctcacctgggcacaggttggcggtattttaaaatatacccgtccggcgtggtggcgtggcgaaacgcctgagacacatcactatttaatgaaaaagccgggttattatctttctgaagaagcctatattgcccggttgcgtaaagaacttaatttggcgctttacagtcgttttccattaacgtggattatggaagctgccgacgacatctcctattgtgtggcagaccttgaagatgcggtagagaaaagaatatttaccgttgagcagctttatcatcatttgcacgaagcgtggggccagcatgagaaaggtagcctctttagcctggtggttgaaaatgcctgggaaaaaagtcgcagtaatagtttaagccgcagtacggaagatcagttttttatgtatttacgggtaaacaccctaaataaactggtaccctacgcggcacaacgatttattgataatctgcctgcgattttcgccggaacgtttaatcatgcattattggaagatgccagcgaatgcagcgatcttcttaagctatataaaaatgtcgctgtaaaacatgtgtttagccatccagatgtcgagcggcttgaattgcagggctatcgggtcattagcggattattagagatttatcgtcctttattaagcctgagcttaagtgactttactgaactggtagaaaaagaacgggtgaaacgtttccctattgaaagccgcttattccacaaactcagcacgcgccatcggctggcctatgtcgaggctgtcagtaaattaccgagtgattctcctgagtttccgctatgggaatattattaccgttgccgcctgctgcaggattatatcagcggtatgaccgacctctatgcgtgggatgaataccgacgtctgatggccgtagaacaataaccaggcttttgtaaagacgaacaataaatttttaccttttgcagaaactttagttcggaacttcaggctataaaacgaatctgaagaacacagcaattttgcgttatctgttaatcgagactgaaatacatgaaaaaaaccacattagcactgagtgcactggctctgagtttaggtttggcgttatctccgctctctgcaacggcggctgagacttctagtgcaacgacagcccagcagatgccaagccttgcaccgatgctcgaaaaggtgatgcctagtgtggtcagcattaacgtagaaggtagcacaaccgttaatacgccgcgtatgccgcgtaatttccagcagttcttcggtgatgattctccgttctgccaggaaggttctccgttccagagctctccgttctgccagggtggccagggcggtaatggtggcggccagcaacagaaattcatggcgctgggttccggcgtcatcattgatgccgataaaggctatgtcgtcaccaacaaccacgttgttgataacgcgacggtcattaaagttcaactgagcgatggccgtaagttcgacgcgaagatggttggcaaagatccgcgctctgatatcgcgctgatccaaatccagaacccgaaaaacctgaccgcaattaagatggcggattctgatgcactgcgcgtgggtgattacaccgtagcgattggtaacccgtttggtctgggcgagacggtaacttccgggattgtctctgcgctggggcgtagcggcctgaatgccgaaaactacgaaaacttcatccagaccgatgcagcgatcaaccgtggtaactccggtggtgcgctggttaacctgaacggcgaactgatcggtatcaacaccgcgatcctcgcaccggacggcggcaacatcggtatcggttttgctatcccgagtaacatggtgaaaaacctgaccagccagatggtggaatacggccaggtgaaacgcggtgagctgggtattatggggactgagctgaactccgaactggcgaaagcgatgaaagttgacgcccagcgcggtgctttcgtaagccaggttctgcctaattcctccgctgcaaaagcgggcattaaagcgggtgatgtgatcaccagtctgaacggtaagccgatcagcagctttgccgcactgcgtgctcaggtgggtactatgccggtaggcagcaaactgaccctgggcttactgcgcgacggtaagcaggttaacgtgaacctggaactgcagcagagcagccagaatcaggttgattccagctccatcttcaacggcattgaaggcgctgagatgagcaacaaaggcaaagatcagggcgtggtagtgaacaacgtgaaaacgggcactccggctgcgcagatcggcctgaagaaaggtgatgtgattattggcgcgaaccagcaggcagtgaaaaacatcgctgaactgcgtaaagttctcgacagcaaaccgtctgtgctggcactcaacattcagcgcggcgacagcaccatctacctgttaatgcagtaatctccctcaaccccttcctgaaaacgggaaggggttctccttacaatctgtgaacttcaccacaactccatacatcttcatcatcctttaggcatttgcacaatgccgtacgttacgtacttccttatgctaagccgtgcataacggaggacttatggctggctggcatcttgataccaaaatggcgcaggatatcgtggcacgtaccatgcgcatcatcgataccaatatcaacgtaatggatgcccgtgggcgaattatcggcagcggcgatcgtgagcgtattggtgaattgcacgaaggtgcattgctggtacttagtcagggacgagtcgtcgatatcgatgacgcggtagcacgtcatctgcacggtgtgcggcaggggattaatctaccgttacggctggaaggtgaaattgtcggcgtaattggcctgacaggtgaaccagagaatctgcgtaaatatggcgaactggtctgcatgacggctgaaatgatgctggaacagagccggttgatgcacttgttggcgcaggatagccgtttgcgggaagaactggtgatgaacctgattcaggcagaggagaatactcccgcacttactgaatgggcgcaacggctggggatcgatctcaatcaaccgcgagtggtggctattgttgaggtcgacagcggtcagcttggcgtggacagcgcaatggcggagttacaacaactgcaaaacgcgctgactacgcccgagcgtaataatctggtggcgattgtcagcctaaccgaaatggtggtgttgaaaccggcgttgaactcttttgggcgctgggatgcagaagatcatcgtaagcgagttgaacaactgattacccgcatgaaagagtacggccagctgcgttttcgcgttagtctgggcaactattttaccggtcctggcagtattgcccgatcctatcgtacggcgaaaacgacgatggtggtgggtaaacagcggatgccagaaagtcgctgctatttttatcaggatctgatgttacctgtgttactcgacagtttgcgtggcgactggcaggccaacgaactggcgcgaccgctggcgcggctgaaaacgatggacaataacggcttgctgcgacgaacgctggcggcgtggtttcgccacaatgtgcaaccgctggcaacgagtaaggcgttgtttattcatcgtaataccctggagtatcggcttaatcgtataagcgaactgaccgggcttgatttgggcaattttgatgacaggttgctgctgtatgtggcgttacaactggatgaagagcggtaagttatgcgttaaggttgaggcggcgctggctcattcccctcagcccgaagggtagaggggaatgcccgaattaaccgtcagttcgggattatttacgcgttagtttttccagatcggcttcaatctcgctgatcttattggttacgacactctccaggtgacgtaagtcgtcgaggatcttacgcttaagatcaacttcgctgcggtcacgctggcagatttgatcaagctcatcaatgatataccgtagattcgggctgatttcctggacttctttataaccctgacccacaccatcagcgacgaccgttttacgctgacgcggatatttaaacttaacgctcttggcgaaaaactcgcctttgtctttctggaaatagattttcagaatatcgttgttggcttcctgccggaggctgtaacgatcaatttcttcaggattggtaatacccagacttttcagattgtcgtacatagcgttacctcaaaatgagtcagtaaattgtgcttattttagcatttggcctggcccgcccggctcgactgtgatcgcagaaagcctttttcttccagacttctatcatggcgtaaaaatcaaaaaattacctgctttattctggtgataaaattcacgatttacaccagttccagcatcgttacttccgggcggcagttcagacgcaaaccatacaaactgcccacgccacgggttgtgtagatgtgtctttcgccaaaggcatttaatccggcgacgtaacgtttatcttcgacaggggcaaaaggttcaccaaccaacggtacgcgcagttgcccgccgtgagtatggccgcacagcatcagatcccagggttcatcacgcatgacttctttgctgtcgggattatgcgccagcaccagtcttggcagattggcttcgctggcgggaggcggtttgcattgtccggcccataagtcaccagtgcctaccagttcgaattgcctgttcggcgtggcgatcaccgtagcctggttaaacaacaccgtgatgcccgcacttttcaacgtctcgccaattaagtgatttttttctgtaccaacagggcgatcgtggttgccgaagcaggcaaacgtcggcgcacattcggcaaggggggagagtacgtcactaaacgcgctaaaattcaggctcatatcaaataatacgtaatcgccgcccagtaatatcaaatcgggcttttgttctatgccaagagcaatcgcgtcagaaatcaggcttaaaggaacaaaacgagagtaatggagatcggccagaaaaagaattttgaatggtgctgcgttgtctttaaaaaaggcgaggcggtgacggattaattcaaaccagcctggctcacagtaatgcatataaccgaaaccactgctcgtggctatcgtcgcggcagtagcctgcaaaaatcggcggcgactaatcatcgctcatccctgcaaaaaaatcgggcagcgtcgtgctgcccgtgtgcatacttttagtcgatggtacgcagcagttcgttaatgccgactttgccgcgagttttcgcgtcaactttcttaacgataaccgcacagtagaggctgtatttgccatctttactcggcagattaccactaacaaccacagaccccgccggaacgcgaccgtagtggatttcgccggtttcacggtcgtaaatacgggtgctctgaccaatgtatacgcccatggaaatgacggaaccttcttcgacaatcaccccttcaaccacttcagagcgcgcgccgatgaagcaattatcttcaatgatggttgggttagcctgcagcggttccagcacgccgccgatgcccacgccaccggaaaggtggacgtttttaccaatctgcgcacaagaaccgacggtcgcccaggtatcaaccatggtgccttcatcaacatatgcgccgatgttgacgtaagacggcatcagcacggtgttacgggcaataaacgcaccctgacgtaccgccgctggtggcacaacgcggaagccttctttctggaaacgtgcttcgtcgtagtcggcgaatttcatcggcactttgtcgaagtagcggctttctgccccttcgatcacctgattatcattaatacggaaagagagcagcaccgcttttttcaaccactgatgcgtcacccactgaccgtcaattttttccgctacacgcagtgcgccggaatccagcagggcgatcacctgatttaccgcttcgcgggtaacggtgtctgcattggctggcgtgatctcggcacggcgttcaaaagcggtttcaataatgttctgtaactgctgcattgttaaactcttttcatatcagtaaacacatcaccctttatcgtttggattgagggcctctgtcaaccgctgatgcacttcctgctgcaactcgttattaagcgcacgccggtcagcggtggcaattatgaataaatcttctactcgctcgccaatggttgtaattcgggcaccatgaaggctaattcccagatcggcaaaaattttcccgactcgcgccagcagtccaggttggtcgagggcgatcagttcgaggaagcttttgcggtcggtatgggtcggcaaaaacgttacttcggtttcaacagtaaaatggcgtaatttggcgggttggcgacggggctgcggtggctgccagctactttgcgtcagtacttgctccagaccaaaccgaataacctcatgacgatctgcggacagcgggttgccatcgggttccagcacgataaaggtatccatcgccataccgtcgcgagtggtgaaaatttgtgcgtcgtgaacacttaaattgcggcggtctaattcggcacagacggcggcaaacagataagggcggtccgggctccagataaaaatctcggtgcctccacgcgtagcctgcgggctaagcaataccagcggtttgcttaaatcatgctgtaataaatggcgggcatgccaggccagttgatttgggctatggcggacaaaatagttagcacgacagcgactccaaatttggtgcagcgcctcttcgtcgatgttatccatgcgcagtagtgccagtgcctggagttggtgatggcgaacccgttcgcgcatatccggcgtgttttgcattccgcgtcgtagctgcttttcggtggcaaagtagagctcacgcaacagactttgcttccagctattccacagcgtttcgttggtggcgcaaatgtcagccacagtcaggcataccagatagcgcagacgattttccgtttgcacttcttcggcaaactgcttgatgacttccgggtcctgaatatcgcggcgttgggcggtcacgctcatcaacaggtgctggcgaaccagccaggcgaccagctgtgtttcgcgactgttcagcccgtggagttcggcaaaatgcactacatcctgagcaccgagaatggagtggtcgccgccgcgtcctttggcgatatcgtgaaacagcgcggcgatgaaaatcagctcagtactcggcaggcgcggccagacgtccacacacaacggatggcgctggcgcgtttcttcactggcaaaactctccagtttcagcatcacgcggatagtatgttcatccaccgtgtaggcgtggaacagatcaaactgcatctgcccgacgatatggctccattgcggcatatacgcgccgagcacgctatggcgatgcattggcaatagcccgcgccgcaccgctccggggtgacgcagaatgctcaaaaacagttttcgtgcttccggaatattacacagcggttgttgcagatggcgacgggcatggcgtaactggcgcagcgtggtggagtaaatgccggtgatcgcactgttgtgcaccatggtgtagaacatacgcaagatggcttccggctggcgcataaatagtgtttcatcacgcaggtcgattagcgtaccgcgtagctgaaactcatcgtcgattggacgtggtttttcgtcggcgggaagggcgaggatggcttcatcgaacagttgcagcagcatctggttgagttcactgacgcggcgtgtaacgcggaagtaatccttcatcatccgctcgaccggttcgttaccttcaccactgtaattcagacgctgggcgacgctaagctggcgatcgaataacaggcgattatcgtaacggctgacgaccagatgcagggcaaagcgaatacgccacaatatatgcagacattcgtttaattccgcccgctccgcactggttaagaagccaaacccgaccatttcatccaggcttgttgcgccaaaatgacggcgggccacccattgcagagtgtggatatcgcgcaagccgccagggctgcttttgatgtctggttcaaggttgtagctggtgccatggtaacgctgatggcgctggttctgttcttcaactttcgccgcgtagaacttgtcggaaggccagaatccttcgctgaaaatatgtttttgcagttcgaggaacagcgcaacatcgccaattaataagcgggattcgattaaattggtggcgacggttaaatcgcttaacccttccagcatgcactcttcaagcgtgcgcacgctatgaccgacttccagctttacatcccagagcagcgttaacagctcgcccactttttgcgcctgatcgtccgggagctttttacggcttaaaatcagtaaatcgacgtcactaagtggatgcagctcgccacgaccgtagccaccgacggcgaccaatgccaggtcggcaatctggctgaatcccgcttcaatccataatcgttgcaggagctggtcgataaactcggtgcgcgcctcaatcaactgttctgcagagatcccattgtcaaaggcatcacccagccaacgctggaaagtatcgatatgggcttttatcccaccgacggttaattcatcacggggccagacgcatggattttgcggttgaccgggcagggtggggagagcggtgtttgcgtactgttctggaagggtattcattgtgcgccacccataagattaaattatcgcattaaaaaagccggcattcgccggcttcatcttattcgtcgtggctgattatcgccgggatggtgtcatccttgcgtagcgtcagaatttcgcagccgttatcagtcaccacaatagtatgctcatattgtgcagacaagctgcgatctttggtttttaccgtccagccatctttcatggtgcggatctcttttttacccgcgttgaccattggctcgatggtgaacgtcatcccaggtttcagtacgacgttggtttcacgggagtcatagtgcagcacctgcggttcttcatggaagccgcgaccaataccgtgtccgcaatattcacgaacgacggagaagccttctgcttcgacaaatttctgaatcgccgcaccgatttcgcgcagattaatgcctggttttaccatgcgtagcgccaggtacaggctttcttgcgtgatgcggcacagacgttcgcccatgatggtcggcttaccgacgataaacattttgctggtatcgccgtggaaaccatctttgattacggtgacatcaatgttaacgatatcgccatctttcagcagcttagcatcgtccgggataccgtggcacaccacttcattaatagagatgcaaacggatttcggatagccgtgatagccgaggcaggcagaaaccgcgtgttgttcattaacaatgtaatcattacagatgcgatccagctcgccggtgctgacgcccggtttaacatacggttcgatcatctccagcacttcggcagccagtcggccagcgacgcgcattttttcgatatcttctggggtcttgatagagatagccattaattctgtccatcagcgtcggtgataccgacaatatatatgtaagtgccgtcaatggtatcacacccgggcaaattgagaatcattctgaatttcgccaaacgtgccactgaaggttttctataatagaaaattcgacgtctgatgctgtacacagcgccaacaattattggtgtccacgacgtatttgtggtataaagcgcgccggacttccgatccatttcgtatacacagactggacggaagcgacaatctcactttgtgtaacaacacacacgtatcggcacatattccggggtgccctttggggtcggtaatatgggatacgtggaggcataaccccaacttttatatagaggttttaatcatggcaactgtttccatgcgcgacatgctcaaggctggtgttcacttcggtcaccagacccgttactggaacccgaaaatgaagccgttcatcttcggtgcgcgtaacaaagttcacatcatcaaccttgagaaaactgtaccgatgttcaacgaagctctggctgaactgaacaagattgcttctcgcaaaggtaaaatccttttcgttggtactaaacgcgctgcaagcgaagcggtgaaagacgctgctctgagctgcgaccagttcttcgtgaaccatcgctggctgggcggtatgctgactaactggaaaaccgttcgtcagtccatcaaacgtctgaaagacctggaaactcagtctcaggacggtactttcgacaagctgaccaagaaagaagcgctgatgcgcactcgtgagctggagaaactggaaaacagcctgggcggtatcaaagacatgggcggtctgccggacgctctgtttgtaatcgatgctgaccacgaacacattgctatcaaagaagcaaacaacctgggtattccggtatttgctatcgttgataccaactctgatccggacggtgttgacttcgttatcccgggtaacgacgacgcaatccgtgctgtgaccctgtacctgggcgctgttgctgcaaccgtacgtgaaggccgttctcaggatctggcttcccaggcggaagaaagcttcgtagaagctgagtaataaggcttgataactcccccaaaatagttcgagttgcagaaaggcggcaagctcgagaattcccgggagcttacatcagtaagtgaccgggatgagcgagcgaagataacgcatctgcggcgcgaaatatgaagggggagagcccttatagaccaggtagtacacgtttggttagggggcctgcatatggccccctttttcacttttatatctgtgcggtttaatgccgggcagatcacatctccgaggattttagaatggctgaaattaccgcatccctggtaaaagagctgcgtgagcgtactggcgcaggcatgatggattgcaaaaaagcactgactgaagctaacggcgacatcgagctggcaatcgaaaacatgcgtaagtccggtgctattaaagcagcgaaaaaagcaggcaacgttgctgctgacggcgtgatcaaaaccaaaatcgacggcaactacggcatcattctggaagttaactgccagactgacttcgttgcaaaagacgctggtttccaggcgttcgcagacaaagttctggacgcagctgttgctggcaaaatcactgacgttgaagttctgaaagcacagttcgaagaagaacgtgttgcgctggtagcgaaaattggtgaaaacatcaacattcgccgcgttgctgcgctggaaggcgacgttctgggttcttatcagcacggtgcgcgtatcggcgttctggttgctgctaaaggcgctgacgaagagctggttaaacacatcgctatgcacgttgctgcaagcaagccagaattcatcaaaccggaagacgtatccgctgaagtggtagaaaaagaataccaggtacagctggatatcgcgatgcagtctggtaagccgaaagaaatcgcagagaaaatggttgaaggccgcatgaagaaattcaccggcgaagtttctctgaccggtcagccgttcgttatggaaccaagcaaaactgttggtcagctgctgaaagagcataacgctgaagtgactggcttcatccgcttcgaagtgggtgaaggcatcgagaaagttgagactgactttgcagcagaagttgctgcgatgtccaagcagtcttaattatcaaaaaggagccgcctgagggcggcttctttttgtgcccatcttgtaaattcagctaacccttgtggggctgcgctgaaaagcgacgtacaatgtcgctagtattaattcatttcaatcgttgacagtctcaggaaagaaacatggctaccaatgcaaaacccgtctataaacgcattctgcttaagttgagtggcgaagctctgcagggcactgaaggcttcggtattgatgcaagcatactggatcgtatggctcaggaaatcaaagaactggttgaactgggtattcaggttggtgtggtgattggtgggggtaacctgttccgtggcgctggtctggcgaaagcgggtatgaaccgcgttgtgggcgaccacatggggatgctggcgaccgtaatgaacggcctggcaatgcgtgatgcactgcaccgcgcctatgtgaacgctcgtctgatgtccgctattccattgaatggcgtgtgcgacagctacagctgggcagaagctatcagcctgttgcgcaacaaccgtgtggtgatcctctccgccggtacaggtaacccgttctttaccaccgacagtgcagcttgcctgcgtggtatcgaaattgaagccgatgtggtgctgaaagcaaccaaagttgacggcgtgtttaccgctgatccggcgaaagatccaaccgcaaccatgtacgagcaactgacttacagcgaagtgctggaaaaagagctgaaagtcatggacctggcggccttcacgctggctcgtgaccataaattaccgattcgtgttttcaatatgaacaaaccgggtgcgctgcgccgtgtggtaatgggtgaaaaagaagggactttaatcacggaataattcccgtgatggataaataagggtaagattccgcgtaagtatcgcgggggcgtaagtctggttataaggcgttattgttgcaggcagtttggtcacggccagcgcgcagcaaccggagcgtacaaaagtacgtgaggatggcgagcactgcccggggccaaaatggcaaataaaatagcctaataatccagacgattacccgtaatatgtttaatcagggctatacttagcacacttccactgtgtgtgactgtctggtctgactgagacaagttttcaaggattcgtaacgtgattagcgatatcagaaaagatgctgaagtacgcatggacaaatgcgtagaagcgttcaaaacccaaatcagcaaaatacgcacgggtcgtgcttctcccagcctgctggatggcattgtcgtggaatattacggcacgccgacgccgctgcgtcagctggcaagcgtaacggtagaagattcccgtacactgaaaatcaacgtgtttgatcgtagtatgtctccggccgttgaaaaagcgattatggcgtccgatcttggcctgaacccgaactctgcgggtagcgacatccgtgttccgctgccgccgctgacggaagaacgtcgtaaagatctgaccaaaatcgttcgtggtgaagcagaacaagcgcgtgttgcagtacgtaacgtgcgtcgtgacgcgaacgacaaagtgaaagcactgttgaaagataaagagatcagcgaagacgacgatcgccgttctcaggacgatgtacagaaactgactgatgctgcaatcaagaaaattgaagcggcgctggcagacaaagaagcagaactgatgcagttctgatttcttgaacgacaaaaacgccgctcagtagatccttgcggatcggctggcggcgttttgctttttattctgtctcaactctggatgtttcatgaagcaactcaccattctgggcagcaccggcagcattggttgcagcacgctggacgtggtgcgccataatcccgaacacttccgcgtagttgcgctggtggcaggcaaaaatgtcactcgcatggtagaacagtgcctggaattctctccccgctatgccgtaatggacgatgaagcgagtgcgaaacttcttaaaacgatgctacagcaacagggtagccgcaccgaagtcttaagtgggcaacaagccgcttgcgatatggcagcgcttgaggatgttgatcaggtgatggcagccattgttggcgctgctgggctgttacctacgcttgctgcgatccgcgcgggtaaaaccattttgctggccaataaagaaagtctggttacctgcggacgtctgtttatggacgccgtaaagcagagcaaagcgcaattgttaccggtcgatagcgaacataacgccatttttcagagtttaccgcaacctatccagcataatctgggatacgctgaccttgagcaaaatggcgtggtgtccattttacttaccgggtctggtggccctttccgtgagacgccattgcgcgatttggcaacaatgacgccggatcaagcctgccgtcatccgaactggagcatggggcgtaaaatttctgtcgatagcgctaccatgatgaacaaaggtctggaatacattgaagcgcgttggctgtttaacgccagcgccagccagatggaagtgctgattcacccgcagagtgtgattcacagtatggtgcgctatcaggacggcagtgttctggcgcagctgggggaaccggatatgcgtacgccaattgcccacaccatggcatggccgaatcgcgtgaactctggcgtgaagccgctcgatttttgcaaactaagtgcgttgacatttgccgcaccggattatgatcgttatccatgcctgaaactggcgatggaggcgttcgaacaaggccaggcagcgacgacagcattgaatgccgcaaacgaaatcaccgttgctgcttttcttgcgcaacaaatccgctttacggatatcgctgcgttgaatttatccgtactggaaaaaatggatatgcgcgaaccacaatgtgtggacgatgtgttatctgttgatgcgaacgcgcgtgaagtcgccagaaaagaggtgatgcgtctcgcaagctgaggataatccggctacagagagtcgcgctatttgttagcgtagggcttcagtgatatagtctgcgccatctgatcgtaagtagttggctttataaggtcagatatgccgtggttttacacggcttttttttgtataggcttcagtattcctgagtaccgtaaaccctgtcagggaataaaaaacgcgtgatgttgtctgctactcaaccacttagcgaaaaattgccagcgcatggctgccgtcatgttgcgatcattatggacggcaatggccgctgggcaaaaaagcaagggaagattcgtgcctttgggcataaagccggggcaaaatccgtccgccgggctgtctcttttgcggccaacaacggtattgaggcgttaacgctgtatgcctttagtagtgaaaactggaaccgaccagcgcaggaagtcagtgcgttaatggaactgtttgtgtgggcgctcgatagcgaagtaaaaagtctgcaccgacataacgtgcgtctgcgtattattggcgataccagtcgctttaacagccgtttgcaagaacgtattcgtaaatctgaagcgctaacagccgggaataccggtctgacgctgaatattgcggcgaactacggtggacgttgggatatagtccagggagtcaggcaactggctgaaaaggtgcagcaaggaaacctgcaaccagatcagatagatgaagagatgctaaaccagcatgtctgtatgcatgaactggcccctgtagatttagtaattaggactgggggggagcatcgcattagtaactttttgctttggcaaattgcctatgccgaactttactttacagatgttctctggcccgatttcgatgaacaagactttgaaggggcgttaaatgcctttgctaatcgagagcgtcgtttcggcggcaccgagcccggtgatgaaacagcctgatgggggtcgcttttgctgaagtatcgcctgatatctgcttttgtgttaatacccgtcgtcatcgcggcgttgtttctgttgccgccggtggggttcgccattgtaacgctggtggtctgcatgctggcagcgtgggaatggggacagcttagcggttttaccactcgtagccagcgagtatggttggcggtgttatgcgggttattgttggcgctgatgctttttctgttgccggaatatcaccgaaatattcatcaaccgctggttgaaatcagtctttgggctagcctgggttggtggattgtcgcgctattgctggtgctgttttacccaggttccgcagcaatctggcgtaactctaaaacattgcgccttatttttggcgtgctaaccattgttcccttcttctggggcatgctggcgttacgggcctggcactatgacgagaatcattacagtggcgcaatatggctgctctatgtcatgatcctggtatggggcgctgactccggcgcatatatgtttggcaaattgtttggtaaacataagctggcaccgaaggtttctccgggtaaaacctggcaaggctttatcggtggactcgctactgcagcggtaatcagttggggttatggcatgtgggcgaatctcgacgtcgctcccgtcaccttactcatttgctctattgtcgcagcgttagccagtgtgctcggcgatctgaccgagagtatgtttaagcgtgaagcaggaattaaggacagcggtcatttaattccaggacacggtggtattttagatcgtattgatagcctgacggctgcggtaccggtctttgcttgcttgttgttactggtattcaggacgctttaacggaaggtaatatgctgagttttctctgggatttggctagcttcatcgttgcactgggtgtacttatcaccgtgcatgaatttggtcatttctgggttgcccggcgttgtggtgttcgcgttgagcgtttcagtatagggtttggtaaggcgctctggcggcgaactgataagctcggcaccgaatatgttatcgccctgatcccgttgggcggttatgtcaaaatgctggatgagcgcgcagaaccggtcgttccggaactccgccaccatgccttcaataataaatctgtcggccaacgagcggcgattattgccgcaggtccggttgcaaacttcatttttgctatctttgcctactggctggtttttattattggtgtgcctggcgtacgtccggtggttggcgaaatagcagccaatagcatagctgcggaagcacaaattgcaccaggtacggaactaaaagccgtagatggtatcgaaacgcctgattgggatgccgtgcgtttgcagttggtcgataaaattggcgatgaaagcaccaccattacagtagcgccatttggcagcgaccaacggcgggatgtaaagctcgatttacgtcactgggcgtttgagcctgataaagaagatccggtatctagcctggggattcgtcctcgtgggccgcaaattgaacctgtactggaaaatgtgcagccaaacagcgcggcaagcaaggcaggtttgcaagcaggcgacaggatcgttaaagtcgatggtcagcccttaacgcagtgggtgacctttgtgatgcttgtccgggataacccgggtaaatccttagcgttagaaatcgaaaggcaggggagtcccttgtctttgacattaatcccggagagtaaaccgggtaatggtaaagcgattggttttgtcggtattgagccgaaagtcattcctttgccagatgagtataaagttgtacgccagtatgggccgttcaacgccatcgtcgaagccacggacaaaacgtggcagctgatgaagctgacggtcagtatgctgggaaaattgatcaccggtgatgtgaaactgaacaacctcagtgggccgatctctatcgccaagggggctgggatgacagcggaactcggggttgtttattacctgccgtttcttgcgcttattagcgtgaacttagggataattaacctgtttccgttgcccgtacttgacggggggcatctgctgttccttgcgatcgaaaagatcaagggcggaccggtatccgagcgggttcaagacttttgttatcgcattggcagcattctgctggtgctgttaatggggcttgcacttttcaatgatttctctcggttatgagagttagttaggaagaacgcataataacgatggcgatgaaaaagttgctcatagcgagcctgctgtttagcagcgccaccgtatacggtgctgaagggttcgtagtgaaagatattcatttcgaaggccttcagcgtgtcgccgttggtgcggccctcctcagtatgccggtgcgcacaggcgacacggttaatgatgaagatatcagtaataccattcgcgctctgtttgctaccggcaactttgaggatgttcgcgtccttcgtgatggtgatacccttctggttcaggtaaaagaacgtccgaccattgccagcattactttctccggtaacaaaagcgtgaaagatgacatgctgaagcaaaacctcgaggcttctggtgtgcgtgtgggcgaatccctcgatcgcaccaccattgccgatatcgagaaaggtctggaagacttctactacagcgtcggtaaatatagcgccagcgtaaaagctgtcgtgaccccgctgccgcgcaaccgtgttgacctaaaactggtgttccaggaaggtgtgagtgctgaaatccagcaaattaacattgttggtaaccatgctttcaccaccgacgaactgatctctcatttccaactgcgtgacgaagtgccgtggtggaacgtggtaggcgatcgtaaataccagaaacagaaactggcgggcgaccttgaaaccctgcgcagctactatctggatcgcggttatgcccgtttcaacatcgactctacccaggtcagtctgacgccagataaaaaaggtatttacgtcacggtgaacatcaccgaaggcgatcagtacaagctttctggcgttgaagtgagcggcaaccttgccgggcactccgctgaaattgagcagctgactaagatcgagccgggtgagctgtataacggcaccaaagtgaccaagatggaagatgacatcaaaaagcttctcggtcgctatggttatgcctatccgcgcgtacagagcatgcccgaaattaacgatgccgacaaaaccgttaaattacgtgtgaacgttgatgcgggtaaccgtttctacgtgcgtaagatccgttttgaaggtaacgataccagcaaagatgccgtcctgcgtcgcgaaatgcgtcagatggaaggtgcatggctggggagcgatctggtcgatcagggtaaggagcgtctgaatcgtctgggcttctttgaaactgtcgataccgatacccaacgtgttccgggtagcccggaccaggttgatgtcgtctacaaggtaaaagagcgcaacaccggtagcttcaactttggtattggttacggtactgaaagtggcgtgagcttccaggctggtgtgcagcaggataactggttaggtacaggttatgctgttggtatcaacgggaccaaaaacgattaccagacctatgctgaactgagcgtaaccaacccgtacttcaccgtagatggcgtaagcctcggtggtcgtctcttctataatgacttccaggcagatgacgccgacctgtccgactataccaacaagagttatggtacagacgtgacgttgggcttcccgattaacgaatataacagcctgcgtgcaggtctgggttatgtacataactccctgtccaacatgcagcctcaggttgcgatgtggcgttatctgtactctatgggtgaacatccgagcacctctgatcaggataacagcttcaaaacggacgacttcacgttcaactatggttggacctataacaagcttgaccgtggttacttcccgacagatggtagtcgtgtcaacctgaccggtaaagtgaccattcctggaagcgataacgaatactacaaagtgacgttagacacggcgacttatgtgccgatcgatgacgatcacaaatgggttgttctggggcgtacccgctggggttatggtgatggtttaggcggcaaagagatgccgttctacgagaacttctatgccggtggttccagcaccgtgcgtggcttccagtccaataccattggtccgaaagcagtttacttcccgcatcaggccagtaattatgatccggactatgattacgaatgtgcgactcaggacggcgcgaaagacctgtgtaaaagcgatgatgctgtaggcggtaacgccatggcggttgccagcctcgagttcatcaccccgacgccgtttattagcgataagtatgctaacagcgttcgtacttccttcttctgggatatgggtaccgtttgggatacaaactgggattccagccaatattctggatatccggactatagtgatccaagcaatatccgtatgtctgcgggtatcgcattacaatggatgtccccattggggccgttggtgttctcctacgcccagccgttcaaaaagtacgatggagacaaggcagaacagttccagtttaacatcggtaaaacctggtaagtgttctccacaaaggaatgtagtggtagtgtagcgatgactttaggcgatcaatataagatcgccgggccacgcaaagaactgcaccctccggtgcaaatgggatggtaaggagtttattgtgaaaaagtggttattagctgcaggtctcggtttagcactggcaacttctgctcaggcggctgacaaaattgcaatcgtcaacatgggcagcctgttccagcaggtagcgcagaaaaccggtgtttctaacacgctggaaaatgagttcaaaggccgtgccagcgaactgcagcgtatggaaaccgatctgcaggctaaaatgaaaaagctgcagtccatgaaagcgggcagcgatcgcactaagctggaaaaagacgtgatggctcagcgccagacttttgctcagaaagcgcaggcttttgagcaggatcgcgcacgtcgttccaacgaagaacgcggcaaactggttactcgtatccagactgctgtgaaatccgttgccaacagccaggatatcgatctggttgttgatgcaaacgccgttgcttacaacagcagcgatgtaaaagacatcactgccgacgtactgaaacaggttaaataagtaatgcctagtattcgactggctgatttagcgcagcagttggatgcagaactacacggtgatggcgatatcgtcatcaccggcgttgcgtccatgcaatctgcacaaacaggtcacattacgttcatggttaacccaaaataccgtgagcatttaggcttgtgccaggcgtccgcggttgtcatgacccaggacgatcttcctttcgcgaaaagtgccgcactggtagtgaagaatccctacctgacttacgcgcgcatggcgcaaattttagataccacgccgcagcccgcgcagaacattgcacccagtgcggtgatcgacgcgacggcgaagctgggtaacaacgtaagcattggcgctaacgcggtgattgagtccggcgttgaactgggcgataacgtgattatcggtgccggttgcttcgtaggtaaaaacagcaaaatcggtgcaggtagccgtctctgggcgaacgtaaccatttaccatgagatccagatcggtcagaattgcctgatccagtccggaacagtggtaggcgcagacggctttggttatgccaacgatcgtggtaactgggtgaagatcccacagattggtcgcgtaattattggcgatcgcgtggagatcggtgcctgcacaaccatcgatcgcggcgcgctggatgacactattattggcaatggcgtgatcattgataaccagtgccagattgcacataacgtcgtgattggcgacaatacggcggttgccggtggcgtcattatggcgggcagcctgaaaattggtcgttactgcatgatcggcggagccagcgtaatcaacgggcatatggaaatatgcgacaaagtgacggttacgggcatgggtatggtgatgcgtcccatcactgaaccaggcgtctattccagtggcattccgctgcaacccaacaaagtctggcgcaaaaccgctgcactggtgatgaacattgatgacatgagcaagcgtctgaaaagccttgagcgcaaggttaatcaacaagactaacgttccatcttttgttcgccaaactttacggcctgtctcattcttacgattgcggcaggccgtgttattattgtcgtttcttatattttgacaggaagagtatcttgactactaacactcatactctgcagattgaagagattttagaacttctgccgcaccgtttcccgttcttactggtggatcgcgtgctggattttgaagaaggtcgttttctgcgcgcagtaaaaaatgtctctgtcaatgagccattcttccagggccatttccctggaaaaccgattttcccgggtgtgctgattctggaagcaatggcacaggcaacaggtattctggcgtttaaaagcgtaggaaaactggaaccgggtgagctgtactacttcgctggtattgacgaagcgcgcttcaagcgcccggtcgtgcctggcgatcaaatgatcatggaagtcactttcgaaaaaacgcgccgcggcctgacccgttttaaaggggttgctctggtcgatggtaaagtagtttgcgaagcaacgatgatgtgtgctcgtagccgggaggcctgatacgtgattgataaatccgcctttgtgcatccaaccgccattgtggaagagggcgcgagtattggcgcgaacgcacacattggtcctttttgtatcgttggaccccatgtcgaaattggtgagggtaccgtactgaaatctcacgttgtcgtgaatggtcatactaaaattggccgcgataatgagatttatcagttcgcctccatcggcgaagttaaccaggatctgaaatatgctggcgaaccgacccgtgtggaaatcggcgatcgtaaccgcattcgcgaaagcgtcaccattcatcgtggcacagtccagggcggtggattgacgaaggtgggcagcgacaacttactgatgatcaacgcgcacattgcgcacgattgtacggtaggtaaccgctgtattctcgccaacaacgcaacgctggcgggtcacgtaagcgttgacgacttcgcgatcatcggcggcatgaccgcagtccatcagttctgcatcattggtgcgcacgtgatggttggcggctgctccggtgtggcgcaggacgtccctccttatgtcattgcgcagggtaaccacgcaacgccgttcggtgtcaatatcgaagggctgaagcgccgcggattcagccgtgaggcgattaccgctatccgcaatgcgtataagctgatttatcgtagcggtaaaacgctcgatgaagtgaaaccggaaattgctgaactggcggaaacatatccggaagtgaaagcctttaccgatttctttgcacgcagtacgcgcggtctgattcgttaatgactgaacagcgtccattaacgattgccctggtcgccggagaaacctccggcgatatcctgggggccggtttaatccgcgctctgaaagaacatgtgcccaacgcccgctttgttggtgttgccgggccacgaatgcaggctgaaggctgcgaagcctggtacgaaatggaagaactggcggtgatgggcattgttgaagtgctcggtcgtctgcgtcgcttactgcatattcgtgccgatctgacaaagcgttttggcgaactgaagccagatgtttttgttggtattgatgcgcctgacttcaatattactcttgaaggtaacctcaaaaagcagggtatcaaaaccattcattacgtcagtccgagtgtctgggcgtggcgacagaaacgtgttttcaaaataggcagagccaccgatctggtgctcgcatttctgcctttcgaaaaagcgttttatgacaaatacaacgtaccgtgccgctttatcggtcataccatggctgatgccatgccattagatccagataaaaatgccgcccgtgatgtgctggggatccctcacgatgcccactgcctggcgttgctaccggggagccgtggtgcagaagttgaaatgcttagtgccgatttcctgaaaacggcccagcttttgcgccagacatatccggatctcgaaatcgtggtgccactggtgaatgccaaacgccgcgagcagtttgaacgcatcaaagctgaagtcgcgccagaccttagtgttcatttgctggatgggatgggccgtgaggcgatggtcgccagcgatgcggcgctactggcgagcggtacggcagccctggagtgtatgctggcgaaatgcccgatggtggtgggatatcgcatgaagccttttaccttctggttggcgaagcggctggtgaaaactgattatgtcagcctgccaaatctgctggcgggcagagagttagtcaaagaattattgcaggaagagtgtgagccgcaaaaactggctgcggcgctgttaccgctgttggcgaacgggaaaaccagccacgcgatgcacgataccttccgtgaactgcatcagcagatccgctgcaatgccgatgagcaggcggcacaagccgttctggagttagcacaatgatcgaatttgtttatccgcacacgcagctggttgcgggtgtggatgaagtcggacgcgggccgttagttggcgcggtcgtcaccgctgcggtgatccttgacccggcgcgcccgattgccgggctgaatgattccaaaaagctgagcgaaaaacgccgtctggcgctctatgaagagatcaaagagaaagcgttgagctggagtctgggccgcgcggaaccccacgaaatcgacgagctgaacattcttcatgcgaccatgctggcgatgcagcgtgccgtcgctgggctgcatattgcgccggaatatgtgttgattgatggtaaccgctgcccgaaattaccgatgcctgcgatggctgtggtgaaaggcgatagccgcgtaccggaaatcagtgccgcgtctatcctggcgaaagtgacgcgtgacgccgaaatggcggcgctggatattgttttcccgcaatatggttttgcccaacacaaagggtacccaaccgcttttcatctggaaaaactggctgaacacggcgcgaccgaacaccatcggcgcagctttgggcctgtcaaacgcgcactgggacttgcgtcctgattcttgtgtcgagattaagtaaaccggaatctgaagatgtctgaaccacgtttcgtacacctgcgggtgcacagcgactacagcatgatcgatggcctggccaaaaccgcaccgttggtaaaaaaggcggcggcgttgggtatgccagcactggcgatcaccgatttcaccaacctttgtggtctggtgaagttctacggagcgggacatggcgcagggattaagcctatcgtcggggcagattttaacgtccagtgcgacctgctgggtgatgagttaacccacctgacggtactggcggcgaacaataccggctatcagaatctgacgttgctgatcagtaaagcgtatcagcgcgggtacggtgccgccgggccgatcatcgatcgcgactggcttatcgaattaaacgaagggttgatccttctttccggcggacgcatgggcgacgtcggacgcagtcttttgcgtggtaacagcgcgctggtagatgagtgtgtcgcgttttatgaagaacacttcccggatcgctattttctcgagctgatccgcaccggcaggccggatgaagaaagctatctgcacgcggcggtggaactggcggaagcgcgcggtttgcccgtcgtggcgaccaacgacgtgcgctttatcgacagcagcgactttgacgcacacgaaatccgcgtcgcgatccacgacggctttaccctcgacgatcctaaacgcccgcgtaactatagcccgcagcaatatatgcgtagcgaagaggagatgtgtgagctgtttgccgacatccccgaagcccttgccaacaccgttgagatcgccaaacgctgtaacgtaaccgtgcgtcttggtgaatacttcctgccgcagttcccgaccggggacatgagcaccgaagattatctggtcaagcgtgcaaaagagggcctggaagagcgtctggcctttttattccctgatgaggaagaacgtcttaagcgccgcccggaatatgacgaacgtctggagactgaacttcaggttatcaaccagatgggcttcccgggctacttcctcatcgttatggaatttatccagtggagcaaagataacggcgtaccggtagggccaggccgtggctccggtgcgggtagtctggtggcctacgcgctgaaaatcaccgacctcgatccgctggaatttgacctgctgttcgaacgtttccttaacccggaacgtgtctccatgcctgacttcgacgttgacttctgtatggagaaacgcgatcaggttatcgagcacgtagcggacatgtacggtcgtgatgcggtaagccagatcatcaccttcggtacaatggcggcgaaagcggtgatccgcgacgtaggccgcgtgctggggcatccgtacggctttgtcgatcgtatcagcaaactgatcccgcccgatccggggatgacgctggcgaaagcgtttgaagccgagccgcagctgccggaaatctacgaagcggatgaagaagttaaggcgctgatcgacatggcgcgcaaactggaaggggtcacccgtaacgccggtaagcacgccggtggggtggttatcgcgccgaccaaaattaccgattttgcgccgctttactgcgatgaagagggcaaacatccggtcacccagtttgataaaagcgacgttgaatacgccggactggtgaagttcgacttccttggtttgcgtacgctcaccatcatcaactgggcgctggagatgatcaacaagcggcgggcgaagaatggcgagccgccgctggatatcgctgcgatcccgctggatgataagaaaagcttcgacatgctgcaacgcagcgaaaccacggcggtattccagcttgaaagccgcggcatgaaggacctgatcaagcgtctacaacctgactgcttcgaagatatgatcgccctagtggcactgttccgccccggtccgttgcaaagtgggatggtggataactttatcgaccgtaaacatggtcgtgaagagatctcctatccggacgtacagtggcagcatgaaagcctgaaaccggtactggagccaacctacggcattatcctgtatcaggaacaggtcatgcagattgcgcaggtgctttctggttataccctcggtggcgcggatatgctgcgtcgtgcgatgggtaagaaaaagccggaagagatggctaagcaacgttctgtatttgctgaaggtgcagaaaagaacggaatcaacgctgaactggcgatgaaaatcttcgacctggtggagaaattcgctggttacggatttaacaaaagccactctgcggcctatgctttggtgagttatcaaacgttatggctgaaagcgcactatcctgcggagtttatggcggcggtaatgaccgccgatatggacaacaccgagaaggtggtgggtctggtggatgagtgctggcggatggggctgaaaatcctgccaccagatataaactccggtctttaccatttccacgtcaacgacgacggcgaaatcgtgtatggtattggcgcgatcaaaggggtcggtgaaggtccgattgaggccatcatcgaagcccgtaataaaggcggctacttccgcgaactgtttgatctctgcgcccgtaccgacaccaaaaagttgaaccgtcgcgtgctggaaaaactgatcatgtccggggcgtttgaccgtcttgggccacatcgcgcagcgctgatgaacagcctgggcgatgcgttaaaagcggcagatcaacacgcgaaagcggaagctatcggtcaggccgatatgttcggcgtgctggccgaagagccggaacaaattgaacaatcctacgccagctgccaaccgtggccggagcaggtggtattagatggggaacgtgaaacgttaggcctgtacctgaccggacaccctatcaaccagtatttaaaagagattgagcgttatgtcggaggcgtaaggctgaaagacatgcacccgacagaacgtggtaaagtcatcacggctgcggggctcgttgttgccgcgcgggttatggtcaccaagcgcggcaatcgtatcggtatctgcacgctggatgaccgttccgggcggctggaagtgatgttgtttactgacgccctggataaataccagcaattgctggaaaaagaccgcatacttatcgtcagcggacaggtcagctttgatgacttcagcggtgggcttaaaatgaccgctcgcgaagtgatggatattgacgaagcccgggaaaaatatgctcgcgggcttgctatcagcctgacggacaggcaaattgatgaccagcttttaaaccgactccgtcagtctctggaaccccaccgctctgggacaattccagtacatctctactatcagagggcggatgcacgcgcgcggttgcgttttggcgcgacgtggcgtgtctctccgagcgatcgtttattaaacgatctccgtggcctcattggtagcgagcaggtggaactggagtttgactaatacaggaatactatgagtctgaatttccttgattttgaacagccgattgcagagctggaagcgaaaatcgattctctgactgcggttagccgtcaggatgagaaactggatattaacatcgatgaagaagtgcatcgtctgcgtgaaaaaagcgtagaactgacacgtaaaatcttcgccgatctcggtgcatggcagattgcgcaactggcacgccatccacagcgtccttataccctggattacgttcgcctggcatttgatgaatttgacgaactggctggcgaccgcgcgtatgcagacgataaagctatcgtcggtggtatcgcccgtctcgatggtcgtccggtgatgatcattggtcatcaaaaaggtcgtgaaaccaaagaaaaaattcgccgtaactttggtatgccagcgccagaaggttaccgcaaagcactgcgtctgatgcaaatggctgaacgctttaagatgcctatcatcacctttatcgacaccccgggggcttatcctggcgtgggcgcagaagagcgtggtcagtctgaagccattgcacgcaacctgcgtgaaatgtctcgcctcggcgtaccggtagtttgtacggttatcggtgaaggtggttctggcggtgcgctggcgattggcgtgggcgataaagtgaatatgctgcaatacagcacctattccgttatcagcccggaaggttgtgcgtccattctgtggaagagcgccgacaaagcgccgctggcggctgaagcgatgggtatcattgctccgcgtctgaaagaactgaaactgatcgactccatcatcccggaaccactgggtggtgctcaccgtaacccggaagcgatggcggcaagcttgaaagcgcaactgctggcggatctggccgatctcgacgtgttaagcactgaagatttaaaaaatcgtcgttatcagcgcctgatgagctacggttacgcgtaattcgcaaaagttctgaaaaagggtcacttcggtggcccttttttatcgccacggtttgagcaggctatgattaaggaaggattttccaggaggaacacatgaacatcattgccattatgggaccgcatggcgtcttttataaagatgagcccatcaaagaactggagagcgcgctggtggcgcaaggctttcagattatctggccacaaaacagcgttgatttgctgaaatttatcgagcataaccctcgaatttgcggcgtgatttttgactgggatgagtacagtctcgatttatgtagcgatatcaatcagcttaatgaatatctcccgctttatgccttcatcaacacccacagcacgatggatgtcagcgtgcaggatatgcggatggcgctctggttttttgaatatgcgctggggcaggcggaagatatcgccattcgtatgcgtcagtacaccgacgaatatcttgataacattacaccgccgttcacgaaagccttgtttacctacgtcaaagagcggaagtacaccttttgtacgccggggcatatgggcggcaccgcatatcaaaaaagcccggttggctgtctgttttatgattttttcggcgggaatactcttaaggctgatgtctctattagcgtcaccgagcttggtagcttgctcgaccacaccgggccacacctggaagcggaagagtacatcgcgcggacttttggcgcggaacagagttatatcgttaccaacggaacaagcacgagcaacaaaattgtgggtatgtacgccgcgccatccggcagtacgctgttgatcgaccgcaattgtcataaaagcctggcgcatctgttgatgatgaacgatgtagtgccagtctggctgaaaccgacgcgtaatgcgttggggattcttggtgggatcccgcgccgtgaatttactcgcgacagcatcgaagagaaagtcgctgctaccacgcaagcacaatggccggttcatgcggtgatcaccaactccacctatgatggcttgctctacaacaccgactggatcaaacagacgctggatgtcccgagcattcacttcgattctgcctgggtgccgtacacccattttcatccgatctaccagggtaaaagtggtatgagcggcgagcgtgttgcgggaaaagtgatcttcgaaacgcaaagcacccacaaaatgctggcggcgttaagccaggctagcctgatccacattaaaggcgagtatgacgaagaggcctttaacgaagcctttatgatgcataccaccaccagccccagttatcccattgttgctagcgttgagacggcggcggcgatgctgcgtggtaatccgggcaaacggctgattaaccgtagtgtagaacgagctctgcattttcgcaaagaggtccagcggctgcgggaagagtctgacggttggtttttcgatatctggcaaccgccgcaggtggatgaagccgaatgctggcccgttgcgcctggcgaacagtggcacggctttaacgatgcggatgccgatcatatgtttctcgatccggttaaagtcactattttgacaccggggatggacgagcagggcaatatgagcgaggaggggatcccggcggcgctggtagcaaaattcctcgacgaacgtgggatcgtagtagagaaaaccggcccttataacctgctgtttctctttagtattggcatcgataaaaccaaagcaatgggattattgcgtgggttgacggaattcaaacgctcttacgatctcaacctgcggatcaaaaatatgctacccgatctctatgcagaagatcccgatttctaccgcaatatgcgtattcaggatctggcacaagggatccataagctgattcgtaaacacgatcttcccggtttgatgttgcgggcattcgatactttgccggagatgatcatgacgccacatcaggcatggcaacgacaaattaaaggcgaagtagaaaccattgcgctggaacaactggtcggtagagtaagcgcaaatatgatcctgccttatccaccgggcgtaccgctgttgatgcctggagaaatgctgaccaaagagagccgcacagtactcgattttctactgatgctttgttccgtcgggcaacattaccccggttttgaaacggatattcacggcgcgaaacaggacgaagacggcgtttaccgcgtacgagtcctaaaaatggcgggataacttgccagagcggcttccgggcgagtaacgtgctgttaacaaataaaggagacgttatgctgggtttaaaacaggttcaccatattgcgattattgcgacggattatgcggtgagcaaagctttctactgcgatattcttggtttcacgctgcaaagcgaagtctatcgcgaagcgcgcgacagttggaaaggggatttggcgcttaatgggcaatatgtgattgagcttttcagttttccgttcccgccggaacgacccagccgaccggaagcttgcggtctgcgtcatctggcttttagcgttgatgacatcgatgcggcagtggcgcaccttgaaagccataacgtgaagtgtgaaaccatccgtgtcgatccatacacgcaaaaacgcttcaccttctttaacgatccggacgggctgccgttggaactgtatgagcagtaaggcttgtcatcgccgcatttgcccggtaacgtgccgggcattgctactgtaaaatcgcaccatcatgacactcacgctcaatagacaacttctcaccagtcgccagattctggtggcctttagcggcgggcttgactccaccgttctgctgcatcagttggtgcagtggcggacggaaaatccgggtgtcgctctgcgcgctattcatgtgcatcacggtttaagtgccaatgccgatgcctgggttacgcattgcgaaaacgtctgccaacagtggcaggtgccgctggtggtcgaacgcgtacaacttgcgcaagaaggactgggcattgaggcccaggcgcggcaggcacgttatcaggcatttgcccgcaccttgttgcccggtgaagtgctggtcaccgcgcaacatctcgacgatcaatgtgaaacctttctgctggcgctaaaacgcggcagtggccctgccgggcttagcgctatggcggaagtcagcgagtttgccggaacgcggcttattcgcccgttgctcgcccgcacgcggggggaactggtgcagtgggcgcgtcagtatgatttacgctggattgaagacgaaagtaatcaggacgacagttacgatcgtaactttctgcgcctgcgcgtagtgccgttattgcagcagcgttggccgcattttgccgaagcaacggcccgcagcgccgcactttgtgctgaacaagagagcctgctggatgaactgctggcagatgatttagcacactgtcaaagcccgcaggggacgctgcagattgtgccaatgctggcgatgagtgatgcccgccgcgcggcgattatccgccgctggctggcagggcagaatgcaccgatgccttcccgcgacgcgttggtgaggatctggcaggaagtggcgctggcgcgggaagatgccagtccctgtttacgtttgggcgcgtttgaaatccgacgctatcagagccaactgtggtggattaaatccgtcaccgggcaaagcgaaaacattgtgccgtggcagacgtggcttcaaccgctggaattaccggcggggctgggaagtgtacagcttaatgcgggaggcgatattcgccctccgcgtgcagacgaagcggtcagcgtgcgtttcaaagcgccaggattgctgcatattgtcgggcgtaacggcggacgtaagctaaagaaaatctggcaagagctgggcgtgccgccgtggctacgtgacaccacgccactgctgttttatggcgaaacgctgattgcggcggcaggggtatttgtgacgcaagaaggtgtggctgaaggtgagaatggcgtaagttttgtctggcagaaaacgcttagttaagtgaaagccggataagacgcatcaaacgtcgcatccggcgaaagtcaatcaggattcgcttaccaccaccgtaccgatttccgggtggctaaagctggtaattttatccagacgcagctcgcgggtttcgccagcggcctcgacgaccaggtactccacatttttgcgggagactaaatcactggcttttgcctgcaatttttcgccatctttcagctcaagtgtcagcattaaatgatgctggcaggcgagctcaagattatcgtaatcatcacaattgattggttgatacgtatcattcattgacataatcgctcaccagtaagtttgccgcagcgtatgctgctttttccctgacagcctcagaaagggcgtcgtcggcagccatttcattcagcactttcaaaacgcagcccagcgcgtccggaacgtatcctaagtctccgctggcgatttccgcgtaccgcttgcgtattaactcacaatatttttccacatgccctcctgtcagcactctgacttaaccgtggatgcaagtctaagcctacgaagataaactctgtttcgcaaggtgactataccacactcatttctgcaatatcagcgccgcaactgcacgtattccgttacaatggcctcctgattcgaaaggagttttcttatggcgcttaaagcgacaatttataaagcgacggttaatgtggccgatctcgaccgcaaccagtttctcgatgcctctctgacgctggcgcgccatcctagtgaaacccaggagcgtatgatgctgcgcttgctggcgtggctgaaatatgctgatgaacgtctgcaatttacccgtggtttgtgtgccgatgatgagccggaagcgtggctgcgtaacgatcacctgggcattgatttgtggattgagctggggctgccggatgagcggcggattaagaaagcctgcacccaggccgcagaagtggcgctgtttacctataatagtcgggcggcgcaaatctggtggcagcaaaatcagagcaaatgtgtgcagtttgccaatctttccgtctggtatctggacgatgaacaactggcgaaagtaagcgcctttgccgatcgtaccatgacgctgcaggcaacgattcaggatggcgtgatctggttaagcgatgataagaataatctggaagtgaacttaaccgcctggcaacaacctagttgaactaaaccgcctggcaacaaccttcatgattgtgatttcccgacatgttgctattcccgatggtgagcttgagatcaccgccattcgtgcgcagggcgcgggcgggcagcatgttaataagaccagtacggctattcatctgcgttttgacattcgggcgtccagcctgccagagtattacaaagagcgtctgctcgccgccagccatcatttgatcagcagtgatggcgtgattgtcattaaggcacaggaataccgcagtcaggaactgaaccgcgaagcagctctggcccggctggtggctatgattaaagaattaacaacagaaaaaaaagcccgacgacccacgcggcccacccgtgcaagcaaagagcgcaggctggcaagcaaagcacaaaaaagtagcgtgaaggcgatgcgcggcaaagtgcgcagcggtcgggaataaaaagaaggaatggatggtgaaaaaagcgatagtgacagcgatggctgtaatcagcctctttactctgatgggatgtaataatcgggccgaagtcgatacgctttctccggcgcaggctgccgaactgaaaccgatgccgcaaagttggcgcggcgtgctgccgtgtgccgattgcgaaggaatcgaaacctctctgttcctcgaaaaagacggaacatgggtgatgaatgagcgttatctcggtgctcgtgaagaaccttcctccttcgcttcctacggtacatgggcgcgaaccgctgacaagctggtattaaccgacagcaaaggtgaaaagagttattatcgggcgaaaggcgatgcgctggagatgctcgatcgtgaaggcaatccgattgaaagccagttcaactatacgctggaagcggcacaatccagtttacctatgacgccgatgaccctgcggggcatgtatttttatatggctgatgcggcgaccttcactgattgcgcgaccggaaaacgtttcatggtagcgaataacgcagagctggagcgtagctacctggctgcgcgcggtcacagtgaaaaaccggtgttactgagtgtagaaggtcactttacgcttgagggtaatccggataccggtgcgccgactaaagtattggcacccgatacggcagggaaattttaccccaaccaggattgcagtagtttggggcagtaacccgtcttgagacagaaacaaacgcaaaacaggccagaaggatatatttcaacattttgaatttgcacgttttttgtaggccggataaggcgtttacgccgcatccggcaatggtgctcaacgcctgatgcgacgctggcgcgtcttatcatgcctacaacccccctcataccttaaggcggataaggcatttactttatcaccgggtcaaaccaacaaagcgacccgccttgatataaatcccaggcttcaggtgcccaacatactgtaactgcgtttctggcttaaacgcagagacatcaccaatacgcatatgcatcagatcggcagggctaatccagccgctttgcgccagtgtaagtggatgcccggctttggcaaaggcatccgtgacaaattcgctacaaaaccagctctttttgtctccttcgcccacactgcttaactgcgctttcgccaggccgctgacgcactgttggcgaaaatcctcggagaacggattcagactgcacatctggcgagtcaccataaagggaataaattcgacaatgccgcgatagttataaccgctatctttgattttattggcaaacgcggtgatatctgtggcttgttgcggggtaagatccgggactcgtaagacgaaaagcttatcactatgcttcatcgcttttttaagggaaacgatctggacgccagcgcctgtcgcttctgcaacgttattatcacccagaaagattgcaacgtgactcacagaggaagtgctgaagacgcggattccaaaactggttaccccaaggctactggagaacagcaaatcgccgggtttgagatcaggtgccgttatttcttttatactttgttcggtgaaagagctttgatgctggaatttgacagcccatgtttttgcctcggcatctactgctgtggcacttgggtctggctggctgatatcaacggtacaagcgctaagtaaaagaaagctggggagaaacaggcggcagtacgcctttggtttatccattttatacaatccatgtaaaaaaagggccctgaaattcaggaccctttctggcatcagcctttaatctgtttcaccagatattcgacgatgtcaccagtcttaattaactgtttctcgccgttgcgacgatatttatattcgatatcgtcgttgtcgaggttacggtcgcccagcacaatagtgtgcggaataccgatcagttccatatcagcaaacatcacgcccggacgctctttgcggtcatccagcagcacttcgataccttgtgcacgcagttcgctgtacagtttctcagcaagctcttgtacgcggaaggatttgtgcatgttcatcggcagaatcgccacctggaacggcgcgatagcgtcaggccatacgatgcctcgttcgtcgtagttctgctcaatcgccgcagctaccacacgcgttaccccgataccgtagcaacccatcgtcaggatttggttacggccatcttcaccctgtacggaggctttcagtgcttcggagtacttggtacccagctggaagatgtgaccaacttcgataccacgtttgatcagcagcctaccctggccatccgggcttggatcgccagccaccacgttacggatatctgcaacttccggggtagcgacatcgcgatcccagttgatgccgaagtagtgtttaccatcgatgttagcaccagcagcgaaatcactcatcgccgcaacggtacggtcaatcaccaccggaatcggcatgtttaccggacccagactacccggaccggctttaaccacggcacgaatttcttcttcggtcgcgaaagtcagcgggcttgcaacctgcggcagtttttctgctttaacttcgttcagctcgtgatcaccgcgcaccagcagcgcaacctgcgggaagctgctgccttcaaccgctttaaccagcagagtcttaaccgttttctcaatcggcagattgaactgttcaaccagttccgcgatggttttcgcgttcggcgtatcaaccagcgtcatttcctgggtagcagcagcgcgcggttctttcggcgcgatagcttctgccagttcaatgttcgctgcatagtcagaggtgtcggagaagaccacatcgtcttcaccgctctgcgccagcacctggaattcgtgagaggcgctgccgccgatagaaccggtgtcggcttgtacggcgcggaaatccagccccatgcggctgaagattttgctgtaggccgcatacattgcatcgtaggtttcctgcagggattcctgagaagtatggaaagagtaagcatctttcatcaggaattcgcgggaacgcatgacgccgaaacgcggacgcacttcgtcgcggaacttggtctggatctgatagaagttcagcggcagctgtttgtaagagctaagctcgttacgaatcaggtcagtgataacttcttcatgagttgggccgagtacgaacggacgctcgccacggtcaacaaaacgcagcagttccggaccgtactgttcccaacgaccactctcttgccacaaatcggctggctgaaccaccggcatgctcacctcgatcgcaccggcgttgttcatctcttcacgcacgatgttttcgacttttttcagaacgcgcacgccggtcggcagccaggtatataacccggaggccagcttgcggatcatcccggcgcgcagcatcagctgatggctgatcacctcggcgtcggcaggtgtctccttgagagtggagagcaggtattggctagtacgcatgttgttacggttccagttggaaggtagaacaggctcaaggcgagcctgggacaaaaaaaagtgatttagtttaccagtgcaaaagaaatgtcaaaagagaagggcgtgaatttaacgcggttccagcgcaaagacttcaaaacctgcgtcggtgacgcgccagcgaacgttaaaatcatgtagccagacggcataggttttgcccgtttcctcacctttacgataggccgggcgcgggtcctgcgccagtacttcgcggataaacagcgttaactgcggataacgcttctccagcgtcaaaagctgcttttcgacctctgcggtaaaactcaccgccatctctgcagctggcgcactttgcgcatagctggcactggcatcgggaaggctttcggcaaaggggagatacggtttgatatccactaccggcgtaccatcgaccagatccagactgccgagcttcagaatcacgctgtctttatggcaaacaacctctttcagctctaccaggctcatgccaattgggttagggcggaaagtagagcgtgttgcgaaaacccccattctggcgttaccgccgaggcgcggtggacgcacagtcggacgccagccgccttccatcgtttgatgaaagacgaaaaggatccataaatggctgaacgcttccaggccgcgaacggcgtcggcctggttgtagggagcaatgagatgcagttcgccgttggcgctttttaccagacctggctggcgcggaacggcgaacttttctttataggggctgcgaataacgcctatttgctcgaactggaaactgctcatttcgccgtaatgttaagcgcagaaccgatacatacagcctgacgatagcagcctggcgtaccgctggtgacttcgcagctatgcagtaatacagcattggctttcattttagaggcgttgatttgcatccgcttacgtgcggttggaatgctcggcggagagtcctgattagaggcctggcaagagtcgccactgacttcaccgagatcgcggaacggtttgccgactaattcttctgcattggtataaattcggaccggcgtggcgcgcggcgctttcggttttgcaggctccgctttcggctggggtgcagtgctttgaacgggttcgacaggggatctgcttaacatggaacagccgcttagcatgagtgctactaaacagatcggtaaagcacgcatagtatttcctcaatgtatgatcaaaacgtcaatattgaatcaggagcttgtaaaaatgacaagacgggcaagcgcccgtcctgaatgatattacaaattgtggaaacagcctaaaaattaccagcctttaacagctccgccgttaaacactttgtttgctgcttcgtaaacttcgtcagactgataagcctggacgaatttcttcacgttctcggcgtctttgttatcttcacgcgtcacgatcaggtttacgtacggggactctttatcttcaacaaagataccgtctttcgccggagtcaggccaatctggctggcataggtggtattgataactgccagagcgatttgcgcgtcgtccagagaacgcggcagttgcggtgcttccagttcaacaattttcagatttttggggttctcaacaacatcaagaacggtcggcagcaggccaacgccatctttcagtttgatcaagcccactttttgcagcagcagcagactacgaccaaggttagttgggtcgtttggcacggcaacctggctaccatcctgcagttcatccagacttttgattttcttggagtaaccagcaatcggataaacaaaagtgttgcctactgcgaccagtttgtagccacgatctttcagttgctgatcaaggtacggtttatgctggaaggcgttggcgtcgatatcgcctttgctcaatgcttcgtttggcagaacatagtcgttgaaggttaccagctcaacgtccaggccatatttgtctttcgcaactttctgcgcgacttctgcaacctgctgttcggcaccaacaatcacgccgactttaatgtggtttggatctttttcatcctgaccgcagcctaccagtgccagacttccgatcagggctcccactgccgcaaaggttttgaatttgaacgccataccttattccttcttcaattatttatgttgtgttgaacgttacttgcgagtgacagcccggacgatgcggtcgcctgcgaactgaattaaataaaccagaatgaccagcaataccagtaccgtattcatcaccgtcgcgttatagccgatgtagccatactgatagccaatctgacctaaaccaccggcaccgactgcaccacccatcgcggaataaccgaccagggtaatcagggtgatagttgccgcattcaccagacccggcagcgcttccggtaacagcaccttacggacgatctgcatcggcgtggcacccattgcgcgggaagcttcaattaacccggttgggatctccagcagagcgttctcgaccatacgggcaataaacggtgctgcaccaacggttaacggaacaatcgctgcctgcaaaccaatgcttgtaccgacaataacgcgggtaaacggaatcatccatacaagcaagataatgaacgggatggaacggaaaatgttcacaatcgcagaaacggtacgatacagcttcgcgttagcaataatttgccccggacgcgtgacataaagcagaacgccaaccggcagaccaatcacaaagccaaaaaaaccggatacgaaggtcattgccagcgtttcccatacgccacgaaccagcagccacatcatcggctcagacataacccagtacctctacttttacatggtgttcctgcagccaggcaatggcggcttgcgtatcttgttgtgtgccgtgcatttcagtcagcatgatgccgaacttaacgccaccggcgtaatccatctgcgcgctaataatgttgttgttgacgttgaaacgacgcgcggtttcagaaagcagtggggcatcgacgctttgaccggtaaactccagacgcagcatcggcacgcagtcagtaaatggctccgcttgcagacgttcctggtaatcttccgggatatccagatgcagggtgctctgaataaacttctgcgccagcggcgttttcggatggctgaacacttcacttaccgtgtcctgctcgatcagttctccattgctgatgaccgccacgcaatcacaaatgcgcttcacaacgtccatttcgtgggtgatcaacagaatcgtcaaccccagacggcggttgatgtctttcagcagttcgagaatagaacgtgtcgttgccgggtccagcgcgctggtggcttcatcacacagcaatactttgggattgctggctaacgcacgggcaattgccacacgttgtttctgcccaccggaaagattgctcgggtagctatcatgcttatcgccaagaccaaccaaactcagcaattccgtcacgcgacgtttgacctcgtctttcggtgtgttgtccagctccagcggcagagccacgttgccaaaaacagtacggctagagagcaggttaaaatgctggaaaatcataccaatctggcggcgagctttggtcaactcggattcactcagcgtggtcagttcctggccatcgaccagcacgctaccctcggttgggcgctccagcaggtttacacaacgtataagcgtactcttacccgcgccactggcaccgataacgccataaatttgtccagctggcacatgcaggctgacgttgttcaacgcctggatggtgcgggtgccctggtggaacactttggtgatattgctaagttttatcattgattatttattatcgtcattaagttagtcgtggcatctcgaatgcctgaaacgggcaacgccgtcaatgaaatggatgttaaggcatccagacgtctaaatcaatcaggtttatgcgaagagcactttcttgcaggtcgaaacatgcgatactagcgtcacatgccttattaaggagctataaaaggtggcgaagagcgtacccgcaatttttcttgaccgtgatggcaccattaatgtcgatcacggctatgtccatgagatcgacaactttgaatttatcgacggtgttattgacgccatgcgcgagctaaaaaaaatgggctttgcgctggtggtagtaaccaaccagtctggcattgctcgcggtaaatttaccgaagcacagtttgaaacgctgaccgagtggatggactggagcctggcggaccgagatgtcgatctggatggtatctattattgcccgcatcatccgcagggtagtgttgaagagtttcgccaggtctgcgattgccgcaaaccacatccggggatgcttttgagtgcacgcgattatttgcatattgatatggccgcttcttatatggtgggcgataaattagaagatatgcaggcagcggttgcggcgaacgtgggaacaaaagtgctggtgcgtacgggtaaacctattacgcctgaagcagaaaacgcggcggattgggtgttaaatagcctggcagacctgccgcaagcgataaaaaagcagcaaaaaccggcacaatgattaaaagatgagcggttgaaataaaaatgcatttttccgcttgtcttcctgagccgactccctataatgcgcctccatcgacacggcggatgtgaatcacttcacacaaacagccggttcggttgaagagaaaaatcctgaaattcagggttgactctgaaagaggaaagcgtaatatacgccacctcgcgacagtgagctgaaagccgcgtcgcaactgctctttaacaatttatcagacaatctgtgtgggcactcgaagatacggattcttaacgtcgcaagacgaaaaatgaataccaagtctcaagagtgaacacgtaattcattacaaagtttaattctttgagcatcaaacttttaaattgaagagtttgatcatggctcagattgaacgctggcggcaggcctaacacatgcaagtcgaacggtaacaggaagaagcttgcttctttgctgacgagtggcggacgggtgagtaatgtctgggaaactgcctgatggagggggataactactggaaacggtagctaataccgcataacgtcgcaagaccaaagagggggaccttcgggcctcttgccatcggatgtgcccagatgggattagctagtaggtggggtaacggctcacctaggcgacgatccctagctggtctgagaggatgaccagccacactggaactgagacacggtccagactcctacgggaggcagcagtggggaatattgcacaatgggcgcaagcctgatgcagccatgccgcgtgtatgaagaaggccttcgggttgtaaagtactttcagcggggaggaagggagtaaagttaatacctttgctcattgacgttacccgcagaagaagcaccggctaactccgtgccagcagccgcggtaatacggagggtgcaagcgttaatcggaattactgggcgtaaagcgcacgcaggcggtttgttaagtcagatgtgaaatccccgggctcaacctgggaactgcatctgatactggcaagcttgagtctcgtagaggggggtagaattccaggtgtagcggtgaaatgcgtagagatctggaggaataccggtggcgaaggcggccccctggacgaagactgacgctcaggtgcgaaagcgtggggagcaaacaggattagataccctggtagtccacgccgtaaacgatgtcgacttggaggttgtgcccttgaggcgtggcttccggagctaacgcgttaagtcgaccgcctggggagtacggccgcaaggttaaaactcaaatgaattgacgggggcccgcacaagcggtggagcatgtggtttaattcgatgcaacgcgaagaaccttacctggtcttgacatccacagaactttccagagatggattggtgccttcgggaactgtgagacaggtgctgcatggctgtcgtcagctcgtgttgtgaaatgttgggttaagtcccgcaacgagcgcaacccttatcttttgttgccagcggtccggccgggaactcaaaggagactgccagtgataaactggaggaaggtggggatgacgtcaagtcatcatggcccttacgaccagggctacacacgtgctacaatggcgcatacaaagagaagcgacctcgcgagagcaagcggacctcataaagtgcgtcgtagtccggattggagtctgcaactcgactccatgaagtcggaatcgctagtaatcgtggatcagaatgccacggtgaatacgttcccgggccttgtacacaccgcccgtcacaccatgggagtgggttgcaaaagaagtaggtagcttaaccttcgggagggcgcttaccactttgtgattcatgactggggtgaagtcgtaacaaggtaaccgtaggggaacctgcggttggatcacctccttaccttaaagaagcgtactttgcagtgctcacacagattgtctgatgaaaatgagcagtaaaacctctacaggcttgtagctcaggtggttagagcgcacccctgataagggtgaggtcggtggttcaagtccactcaggcctaccaaatttgcacggcaaatttgaagaggttttaactacatgttatggggctatagctcagctgggagagcgcctgctttgcacgcaggaggtctgcggttcgatcccgcatagctccaccatctctgtagtggttaaataaaaaatacttcagagtgtacctgcaaaggttcactgcgaagttttgctctttaaaaatctggatcaagctgaaaattgaaacactgaacaatgaaagttgttcgtgagtctctcaaattttcgcaacacgatgatggatcgcaagaaacatcttcgggttgtgaggttaagcgactaagcgtacacggtggatgccctggcagtcagaggcgatgaaggacgtgctaatctgcgataagcgtcggtaaggtgatatgaaccgttataaccggcgatttccgaatggggaaacccagtgtgtttcgacacactatcattaactgaatccataggttaatgaggcgaaccgggggaactgaaacatctaagtaccccgaggaaaagaaatcaaccgagattcccccagtagcggcgagcgaacggggaggagcccagagcctgaatcagtgtgtgtgttagtggaagcgtctggaaaggcgcgcgatacagggtgacagccccgtacacaaaaatgcacatgctgtgagctcgatgagtagggcgggacacgtggtatcctgtctgaatatgggggggaccatcctccaaggctaaatactcctgactgaccgatagtgaaccagtaccgtgagggaaaggcgaaaagaaccccggcgaggggagtgaaaaagaacctgaaaccgtgtacgtacaagcagtgggagcatgcttaggcgtgtgactgcgtaccttttgtataatgggtcagcgacttatattctgtagcaaggttaaccgaataggggagccgaagggaaaccgagtcttaactgggcgttaagttgcagggtatagacccgaaacccggtgatctagccatgggcaggttgaaggttgggtaacactaactggaggaccgaaccgactaatgttgaaaaattagcggatgacttgtggctgggggtgaaaggccaatcaaaccgggagatagctggttctccccgaaagctatttaggtagcgcctcgtgaactcatctccgggggtagagcactgtttcggcaagggggtcatcccgacttaccaacccgatgcaaactgcgaataccggagaatgttatcacgggagacacacggcgggtgctaacgtccgtcgtgaagagggaaacaacccagaccgccagctaaggtcccaaagtcatggttaagtgggaaacgatgtgggaaggcccagacagccaggatgttggcttagaagcagccatcatttaaagaaagcgtaatagctcactggtcgagtcggcctgcgcggaagatgtaacggggctaaaccatgcaccgaagctgcggcagcgacgcttatgcgttgttgggtaggggagcgttctgtaagcctgtgaaggtgtactgtgaggtatgctggaggtatcagaagtgcgaatgctgacataagtaacgataaagcgggtgaaaagcccgctcgccggaagaccaagggttcctgtccaacgttaatcggggcagggtgagtcgacccctaaggcgaggccgaaaggcgtagtcgatgggaaacaggttaatattcctgtacttggtgttactgcgaaggggggacggagaaggctatgttggccgggcgacggttgtcccggtttaagcgtgtaggctggttttccaggcaaatccggaaaatcaaggctgaggcgtgatgacgaggcactacggtgctgaagcaacaaatgccctgcttccaggaaaagcctctaagcatcaggtaacatcaaatcgtaccccaaaccgacacaggtggtcaggtagagaataccaaggcgcttgagagaactcgggtgaaggaactaggcaaaatggtgccgtaacttcgggagaaggcacgctgatatgtaggtgaagcgacttgctcgtggagctgaaatcagtcgaagataccagctggctgcaactgtttattaaaaacacagcactgtgcaaacacgaaagtggacgtatacggtgtgacgcctgcccggtgccggaaggttaattgatggggttagcgcaagcgaagctcttgatcgaagccccggtaaacggcggccgtaactataacggtcctaaggtagcgaaattccttgtcgggtaagttccgacctgcacgaatggcgtaatgatggccaggctgtctccacccgagactcagtgaaattgaactcgctgtgaagatgcagtgtacccgcggcaagacggaaagaccccgtgaacctttactatagcttgacactgaacattgagccttgatgtgtaggataggtgggaggctttgaagtgtggacgccagtctgcatggagccgaccttgaaataccaccctttaatgtttgatgttctaacgttgacccgtaatccgggttgcggacagtgtctggtgggtagtttgactggggcggtctcctcctaaagagtaacggaggagcacgaaggttggctaatcctggtcggacatcaggaggttagtgcaatggcataagccagcttgactgcgagcgtgacggcgcgagcaggtgcgaaagcaggtcatagtgatccggtggttctgaatggaagggccatcgctcaacggataaaaggtactccggggataacaggctgataccgcccaagagttcatatcgacggcggtgtttggcacctcgatgtcggctcatcacatcctggggctgaagtaggtcccaagggtatggctgttcgccatttaaagtggtacgcgagctgggtttagaacgtcgtgagacagttcggtccctatctgccgtgggcgctggagaactgaggggggctgctcctagtacgagaggaccggagtggacgcatcactggtgttcgggttgtcatgccaatggcactgcccggtagctaaatgcggaagagataagtgctgaaagcatctaagcacgaaacttgccccgagatgagttctccctgactccttgagagtcctgaaggaacgttgaagacgacgacgttgataggccgggtgtgtaagcgcagcgatgcgttgagctaaccggtactaatgaaccgtgaggcttaaccttacaacgccgaagctgttttggcggattgagagaagattttcagcctgatacagattaaatcagaacgcagaagcggtctgataaaacagaatttgcctggcggccgtagcgcggtggtcccacctgaccccatgccgaactcagaagtgaaacgccgtagcgccgatggtagtgtggggtctccccatgcgagagtagggaactgccaggcatcaaattaagcagtaagccggtcataaaaccggtggttgtaaaagaattcggtggagcggtagttcagtcggttagaatacctgcctgtcacgcagggggtcgcgggttcgagtcccgtccgttccgccacttattaagaagcctcgagttaacgctcgaggttttttttcgtctgtatatctattattgccagaatcgcaaaaatcctctgcattttacgctctttttcctcaacagtctgaagcccataatcacctcagttaacgaaaatagcattaaaagaggcatattatggctatccctgcatttggtttaggtactttccgtctgaaagacgacgttgttattagttctgtgataacggcgcttgaacttggttatcgcgcaattgataccgcacaaatctatgataacgaagccgcagtaggtcaggcgattgcagaaagtggcgtgccacgtcatgaactctacatcaccactaaaatctggattgaaaatctcagcaaagacaaattgatcccaagtctgaaagagagcctgcaaaaattgcgtaccgattatgttgatctgacgctaatccactggccgagtccagacgatgaagtctctgttgaagagtttatgcaggcgctgctggaagccaaaaaacaagggctgacgcgtgagatcggtatttccaacttcacgatcccgttgatggaaaaagcgattgctgctgttggtgctgaaaacatcgctactaaccagattgaactctctccttatctgcaaaaccgtaaagtggttgcctgggctaaacagcacggcatccatattacttcctatatgacgctggcgtatggtaaggccctgaaagatgaggttattgctcgtatcgcagctaaacacaatgcgactccggcacaagtgattctggcgtgggctatgggggaaggttacagtgtaattccttcttctactaaacgtaaaaacctggaaagtaatcttaaggcacaaaatttacagcttgatgccgaagataaaaaagcgatcgccgcactggattgcaacgaccgcctggttagcccggaaggtctggctcctgaatgggattaagcctctctgacagctcctccgggagctgtttttacatgctcgctaaggaaatcgataaaagcccggatgcgcgtacttaccgcacggtcgctgtaatagacggcactgaatggcatttccactggcaacactttatctgccattaactccaccaattctccgcgagcgatttctttgtcgatcatgtagtcggacaaacacgcaatcccgttgccactcaggcaaagctgtttcagtgtttccccactattggaactcaaaccgtacttcacctcatgtaattgtccatcgctacgggctatcggccaggtattgagggaagcgggttcagtgaatcccaggcaaatatgttgctttaaatcgtcgatcgtttctggcttcccgtagcgggaaatataatcgggggaggcgataatttttcgataactgttaaataacggcctggcacgtaagctggaatccgttaacgtaccagcgcgtatcgcgacatccacttttctttcgatcaaattaataatcgtttcggaggagactaggctcaaagtgacttccggatagcgttcacggaaaggcttaattaacggcatcagaaagtgcagcaccactggagttgcggcatcgatccgtaacagtccacgcggtgtattacgcgtctccataatttcactttctgccgctgccatctcctgcaaaatactctgtacgcgacgaaaataacgctcgccttcttccgtcaggctaagttgtcgcgtggtccgattaagcaggctaacgccaagtttcatctccagctttttcaccgcccggcttaccgcactgtttgcttgccctaattgttccgctgcccggctaaagctgccgctttcgacgacgctaacaaaaatggcgagttcttcgctcgtggctttcatttttgctcctgttgcaaaatagaagagatattttgaatttatttgtcattaaaccatcaggatgcgtgatatgtcatgcgatttaatgttctccataatgagcaaaattctgaccggtgtaagcacttgcttacataacaatatacaattgctcgttgaaagagtgagctaaaatccctataacagtagaaccctcccgagtgcggaagggttgacgtaatagaggtttcaaagtcaaaagtgcgaaaaaacacctatgccatgcgctatgttgccggacaacctgcggaaaggatcttaccgccggggtcttttgcgagcatcggccaggcattaccacctggggaaccgttaagtaccgaagagcgtattcggatcctggtgtggaacatatacaaacagcaacgcgctgaatggttgagcgtattaaagaactacggcaaagatgcacatctggtgttattgcaggaagcgcagacaacgccagagttagtacagtttgcgaccgctaactatcttgccgccgatcaggtacccgctttcgtgctgccacaacatccttctggcgtaatgacccttagcgcggcacatccagtgtattgctgcccgttacgtgaacgagaacccattttgcgtctggcgaagagcgcactggtgacggtctatccattacctgacacccgcctgttgatggtggttaatatacacgccgtcaacttcagtctgggcgtggatgtctatagtaagcagttacttcctattggcgatcagatagctcaccacagcggcccggtcattatggcgggagatttcaatgcctggagccgtagaaggatgaacgcgttatatcgctttgcgcgggaaatgagcctgcgccaggtgcgttttaccgatgatcagcgccgtcgggcgtttggtcgcccgctcgattttgttttctaccgtggtctgaacgtcagtgaagcttctgtactggttacgcgcgcttccgatcacaatccgctactcgttgaattcagtcccggcaagcctgataaataaggtatgagtggtctgccacagggcagaccaacgtttggcgctgcgcaaaacgtgagcgcggtggtggcgtatgacttatctgcccacatgctggatgtcgtggcacaagctgccgaagcccggcaactgaaaaatatcaccacccgccagggatatgccgaaagtctgccatttgccgataacgcatttgatattgttatcagccgttattctgcccatcactggcatgatgttggtgcagcactgcgagaagtgaataggatattgaaacctggcggtaggctgattgtgatggacgtaatgtctccgggtcacccagtgcgcgacatctggttacagacggtagaagcattacgcgatacctctcacgtacgaaactacgccagcggtgagtggttgacgttaatcaatgaagccaatctgatagttgataatttaattacagataagttaccgctggaattttctagttgggtcgcgagaatgcgtacgccagaagcgttagtagacgctattcgcatttaccaacagagcgcaagcacagaggtgagaacgtattttgccttgcagaatgatggctttttcaccagtgatatcatcatggtagatgcacataaagcggcataaataaaaaaggcaccgggggaatcggtgcctttttattatctggtttgtcaggaatctggcatgttgttgtttttcacaaacaacgtcagcttatcgcctggttgcagattcgcagtgtcgctgttccagcgcatcacatctttgatgttcacgccgtggcgtttagcaatgctactaaggctatcgcctttgcgcacacgatacgtaatgctatcgctgttgtttgccagtcgctgtgcgctactgcctgcaccaatcgtcaaactttggcctggcttcagcttagatccgcgcagtttgttccactgctgcaaatctttggtgcttacgccgagacgactagcgatactactaagcgtgtcgccagagcgtacggtgtaaacacggctgttaagcggcgtattgtcggcaaccagcgtgctctgtacagcagcaatttcgccactagccagagattcacgcagttgatctgcatgcttctttggcaccatcacgtactgcgggccacttgcgcccagcgtggagccttttacgccagcgttgaatgtcttcagcttgctgacggaaatccccgccatatctgctaccttcgccatttcaaccgggctgctcaggtgcacacgcgccagagcacggctttcatcggtcgttggcagacgtacgccataacgcttgctgtttttgagaatatcactcaatgccagcattttaggcacgtactgcttcgtttcctgcggcaacggtaagctccagaagtccgtggatttcccacgcgctttgttcgttttaattgccttcatgacccgaccttcgccgctgttataagccgctacggtcagaagccagtcgccgtcaaacattttgttcagacgctgcatcatattcagcgcggcagttgcactagcaacaacatcgcgacgcgcgtcataattgcgggtctgtttcaaaccataattgcgccccgtgctcggaatgatctgccagatgcctgcggcattggcgccagacgttgcgtgaggatcaaaagcgctctccactatgggtagtagtaccagttccataggcatgttacgttttttaacttgccctgctatccagtacatatacggctctgcccgtaaagttacatcgtggagatagctcttattgcgtaaatatttctgtttctgttcgcgaatccggtcattttccggaattcccatctttagctcgtcgccaatgaaagcccacaagtcaccatctggcgcgatagacgtcccatcgtccatccatcgtgcctgacttgtaaactttgctgcttccccttgaccagctgcagaaaggctctgtgcgtgctgttgaacgttgccggtactctggcaacccacgagcaggacagaggcgagtaatatcgcttttgccttcatgtgtgtgtcaatagttgcttaaaagacgaccgatcataacggcgaacggagccgatgacaagaaagttttatcagaacctatctttcttactccttaaccatgcaaaacgctcttcaggttgttgcaataatgtttcttcattaattacattaattaaatcaatatcttccgttcttaaaaaaacattaatttgccgctcatttttcagaattacgggtagtgttatttgattttttgcccgtaactccttaactttacgataataatcatttatggacaaatcgtgcggaagaatactcaaagcaaacttcatattacttaaggtatattcatgagcacaacataccaatgtatcgtcaggtaacgcacttaactttttaagactttgatacatttgacttgctgtcccttcaaacaaccgaccacacccaccagaaaacagtgtgtcgccgcaaaatagataaggtttactgaagtaacagatatgtcctaaagtgtgacccggcgtagcaattacactaaattcatgccccaaaacgaaggcagtttcgccatctttgactacctgtgttgttcccttatcttgtgtctcttgtggaccatacaccacaatttgtggaaacttttccaccagttcttttacgccgccaacgtgatcgtggtgatggtgggtgagaaatatggcctccggttgccagttattggcggcaatggcgtttaatactggctctgcgtctccgggatcgacaatcaggcagcgacctgcttcatcattcaaaacccagatgtaattgtcatcaaaggcgggaatactgttaagattcatagattacctctcagtgtgaaacggaaggttgtgatgaaaccggcaagagtccctcaaactgtcgtggctcctgattgctggggcgatttgccctggggaaagctttatcgcaaggcgctggagcgccagctcaacccgtggttcactaaaatgtatggttttcatctgcttaagattggcaatttaagcgcagaaatcaattgcgaagcgtgcgcggtttctcatcaagtgaatgtttctgcgcaaggaatgcccgtccaggtacaggcggacccacttcatcttccttttgccgataaatccgttgatgtttgtctactggcacatacattgccgtggtgcaccgatccgcatcgtttattgcgtgaagccgatcgggtattgattgatgatggctggctggtcattagtggcttcaatcccatcagttttatgggattacgcaaacttgtgccggtattgcgcaaaaccagcccctataacagccggatgtttactctgatgcggcagctggactggctctctttgttgaattttgaagtgctacacgccagccgtttccacgttctcccgtggaacaaacacggaggaaaactattgaatgcgcatattcctgcgcttggttgcttacaacttattgttgcccggaaacggactattcctttaacgctaaatccgatgaaacagagtaaaaacaagccacgaattcgccaggcggttggagccacccggcaatgtcgtaaaccacaggcttaaacttcaacttggtagcctgtatcttccagtgtgggattcatcgccgcggcacgagccagttcatcacagcgttcgttttccgggtgtccggcatggcctttaacccattcccatttgatttgatgctgccccaatgcagcatcaagacgttgccagagatcgacattttttactggttttttgtctgcggttttccagccacgttttttccagttatggatccactgggtgataccctggcggacatactggctgtcggtactcaaaatgacttcgcaatgttcttttaacgcctccagcgcgacaatagcggccatcaactccatacggttgttggtggtgcgggtgtagccagcgctaaaggttttctcgcgtccgcgatagcgtaaaatagcgccgtaacccccaggtcctggattgcccagacagctaccatcggtgaaaatttctacctgtttaagcatctctggtagacttcctgtaattgaatcgaactgtaaaacgacaagtctgacataaatgaccgctatgagcactgcaattacacgccagatcgttctcgataccgaaaccaccggtatgaaccagattggtgcgcactatgaaggccacaagatcattgagattggtgccgttgaagtggtgaaccgtcgcctgacgggcaataacttccatgtttatctcaaacccgatcggctggtggatccggaagcctttggcgtacatggtattgccgatgaatttttgctcgataagcccacgtttgccgaagtagccgatgagttcatggactatattcgcggcgcggagttggtgatccataacgcagcgttcgatatcggctttatggactacgagtttagcttgcttaagcgcgatattccgaagaccaatactttctgtaaggtcaccgatagccttgcggtggcgaggaaaatgtttcccggtaagcgcaacagcctcgatgcgttatgtgctcgctacgaaatagataacagtaaacgaacgctgcacggggcattactcgatgcccagatccttgcggaagtttatctggcgatgaccggtggtcaaacgagcatggcttttgcgatggaaggagagacacaacagcaacaaggtgaagcaacaattcagcgcattgtacgtcaggcaagtaagttacgcgttgtttttgcgacagatgaagagattgcagctcatgaagcccgtctcgatctggtgcagaagaaaggcggaagttgcctctggcgagcataaatacctgtgaaaggcgctaaaaatagcgacttgggcgatttttgcagcaaacgattcaaaagatgagaaaaaccgttgacgaaggtcgaggcaatccgtaatattcgcctcgttcccaacggaacacaacgcggagcggtagttcagtcggttagaatacctgcctgtcacgcagggggtcgcgggttcgagtcccgtccgttccgccactattcactcatgaaaatgagttcagagagccgcaagatttttaattttgcggtttttttgtatttgaattccaccatttctctgttcaatgattttactctggcgtaggtgcgtgattctcgcttgttgtctcattcattaaaattcaataatgatatcgaaccattcagcttaaatatatttctagagaataaatttatattgattaaatgaatgtatatttcaaattgattttgtttgttattatttaagtgaggtatataattagagtccgttatcaatgctaaatattctaatcattatgacaggcgagggagtgtccaattatgaatagtaaaaagctttgttgcatatgtgtgttattcagcctgcttgcaggatgtgcctctgaatcttctattgatgaaaagaagaaaaaagctcaagtcacacaaagtaatattaataaaaacactccccagcaactgacagacaaagatttattcggtaatgaaaccactctggccgtatccgaagaggatattcaagctgcgcttgatggagatgagttccgcgttccccttaattctcctgtaatacttgttcaatccggcaaccgcgcaccggaaaccattatgcaggaggagatgcgaaaatattatactgtttccacattctctggtatcccggacaggcaaaagcctctgacttgtaacaaaaacaaagataaaaatgagaacgaggatgttgccagtgctgagaatatgaactggatgcaggcactgcgttttgtggctgcaaaaggacatcagaaagcgattattgtttaccaggatatgttgcagacaggaaaatatgactctgcgctgaaaagtacagtatggtccgactataaaaatgacaaactcactgacgctatctccctgcgctacctggtacgtttcacgctggtggatgtggcaacaggtgagtgggctacctggagcccggtgaattatgaatataaagtgcttccaccattgcccgacaagaatgaagccagtacgactgatatgacagagcagcaaatcatgcaacttaagcaaaagacctataaagcgatggtaaaagatttggttaaccgctatcaataataaattatatctgccgccaggaatttctggcggcaataatacaaaattctttgcataagaaatttttcttgacaaagacagtgcaagaaaggacatggaatccggagttaaaaactgtttgttttagaatatttaattatttaactgctgaatcttccttgcgagaaatatatccattattacatttcatgccatttttaatatagattgctcctgggaaaattcccgtattattaccgcaggggtgataattagtattgacatatcctgtgacaaaaggagctattaaaggtgctattacgatagctattagtaaaaatataagagttagctgtattgttatgtctgtggcgaaattgactaccttcgtttttttgattaagaatgattttattatcgtaagtaaaattacatgaatatttaaaaaggaaaacgacatgaaaccgaagcacagaatcaacattctccaatcataaaatatttccgtggagcattttattattgaatatagaggtttaactccggtaaaaaacaaagaagcattgaatgcagggaaaaataatatggccataaaaaacatcgaaagaaactcttttaatttaacatgtaaacgcatggttaatcctcatatcacgggtggagtgttaagaacatacataaatggagtcatgttttcccttttccatttatcaagttcctgttgccgttttagtccatctctaattgcatattttaatttttcacttaaatggcattgagcatcgatttcatttaaaacaactgtacacactatccctgtcagtaaaattgctcctccgacaagaattactggaaagccaaagctaacacaggcaaaagaagccagacttccaatagcggttgcaacaccaccggctataactgctttggccacatccatactaaaatcgccaagaaaattaaccagatctcgctcactactcataataaattctatggttctgctgatttaaccgcagagaagttcgccacagcaatccgaaaccactggcacgtggagaataagctgcacaggcgtctggacgtggtaatgaatgaagacgactacaaaataagaagaggaaacgcagcagaattatttagtgggatacggcacattgctattaatattttgacgaatgagaaggtattcaaggcagggttaagacgtaagatgcgaaaagcagccatggacagaaactacctggcgagtgtccttgcggggagcgggcttagctaataataccccgactctccccgtccttaaacacaacccccactcaccacaacctaaactcatccgcatcctgccatgccggaaacttttctctatattcccgcaatgctgccatgctcagctccgcatcaatgcgcgttgcctgatgcgcgtcggcagtagcgataatctctccttgcggattaatcacccggctgtcaccgcgataatggcagccgttgccatcgctgccgacgcgattgcatcccgccacatacgcctgattctcaatcgcgcgggccgtcagcaatgcctgccagtgcagagagcgcggagcaggccagttggcgacgtacagggcgaggtcataatcgttgagattgcggctccacacaggaaaacgtaagtcgtagcacaccagcggcaaaatacgccagccgcgccattccacaatcactcgcgcattgcccgctttataatgtagatgctcatctgccatgcggaacagatgacgcttatcataaaaatgtaccgtgccgcccggctcaaccagcaaaaagcggttaacgctaccagactccgtttgtaatgcaacactgcctgcaatcagcgcattgcactgctgcgccttagctgtcatccagttcactacgtcatcttgtgctaggctgctagctgccgcttccatggcaaagccgctggtaaacatctccggtagaacgatcacatcgcgcccggtaataccttccagttgacgatcaaaatgacgcaggttggcaggaccatccatccacaccagtggttgctgcaaaagcgtaatcttcaaaccaggcacggtgtacaactcctttatgcgaagggttttataactttaacaccttatcaggcagttgccttagcgcagaataaattgataacaaatgctgatattggaaatatctgatttgcaaattatcgtgttatcgccaggctttaggaggttaataacatgggcaggataagcagcggaggaatgatgtttaaggcaataacgacagtcgccgctctggtcatcgccaccagtgcaatggcgcaggatgatttaaccattagcagccttgcaaagggcgaaaccaccaaagctgcatttaatcagatggtacaagggcataagctgcctgcctgggtgatgaaaggcggtacttatactcccgcacaaaccgtaacgttgggagatgagacgtatcaggtgatgagcgcgtgcaaaccgcatgactgtggcagccaacgtatcgctgtgatgtggtccgagaaatctaatcagatgacggggctgttcagcactattgatgagaaaacgagccaagagaaactcacctggctgaatgtgaacgatgcgcttagcattgatggtaaaacggtgttgttcgcggcgttgaccggcagcctggaaaaccatccggatggctttaattttaaataattagcggataaagaaacggagcctttcggctccgttattcatttacgcggcttcaactttccgcactttctccggcaactttaccggcttcgtcgccagctcttccggatcaaagtcatcaacgttaatactgcgcagacggctttcttcagctttcaccagaatagcggcttcatctttatcaatcagccccttcaccagcgcgttgtgcgccagttcatccagacgggtaaacggcaggtttttacccagctctttacagatccgctgatgaattgggtcggcggcaatcacatccaccagcgcctcttccagcaagccaaccggattatgctcgctcggcgtcaggtactgaccgcgaccaatgcgggaacgggtggcgttcggcacttgtaaaatcttcgccactttatgatccagcttgtcagaaggtgccagataatgacgtccggtcgggaagatcaccacattcagcagcccggcaaccacgcggttcgggaagttttgcagtaaatcatccatcgcctgttcagcctgatacagcgcatcttgtacgccccagtgcaccagcggcaggtcggcttcattacggccttcgtcgtcataacgcttcagcacggcagaggcgaggtagagctggcttaaaatatcccccagacgggcgctgatgcgctcgcgacgtttcaggctgccgcccagcactgccatgctgacatcagaaagcagggcgaggttggcgctcaggcggttcaggtgctgatagtagcgtttagtggcatcgccggttggcgtgctgctggttaaaccgcgcgtcaggcccagccagaagctgcgaactttgttgctaccgacgtgaccgatatgtttgaacaacagtttatcgaacgcgttgacgtcattgttcttcgccgcttccatctcttccagcacgtacggatggcaacgaatcgctccttgtccgaagatcatcatgctgcgggtcagaatgttagccccttcaacggtgatggcaatcggtgcgccctggtaagcacgcgccaggaagttgctttgcccgagcataatgcctttaccgccggtaatatccatcgcatcaataatgttctgctgcccgcggtgggtacagtgatacttaacgatagcgctcagcacggcaggtttttcgccgagcataatgccgtaggtaatcaggcttgccgcagcatccatcacgtaggcattaccggcaatacgcgccagcggctcttcaatcccttccatcttaccaatagagattttgaactgacggcgaatgtgagcatacgcgccggttgccagcgctacgcttttcacgccgccggtactgttggaaggcagggtgatgccgcggcctacgctgaggcactccaccagcatccgccagccttgcccggccattttcggcccgccgatgatgtaatcgatcggcacgaagacatctttaccgcgcgtcggtccgttctggaacggtacgttcagcgggaagtggcgacgaccaatttccacgcccggcgtggtggttgggatcagcgcacaggtaatgcctaaatcttctgcaccgccgagtaatttttccgggtcggagagtttaaacgccagcccaagcacggtcgcaatcggtgccagcgtaatgtagcgtttgttccaggtcagacgcatccccagcacctgctggccctgccattcgcccatgcagacaatcccggtgtccggaatcgcgcccgcatcggaacccgcttccgggctggtcagtgcaaagcaggggatctcctgaccacgcgccagacgcggcagatagtgatctttctgctcgtcagtgccgtaatgttgcaacagttcgcccgggcctaaactgtttggcacgccgacggtaatcgccaggatcccgctcacgccggagagtttttgcagcacgcgagactgggcataagcgctgaactccagcccgccgtactcttttttgatgatcatcgcgaagaaacgatgctctttaaggtacgcccacaactccggcggcagatccgccagctcatgggtgatctggaaatcattcgccatccggcaggcttcttctaccgggccgtcgagaaacgcttgctcttcggcggtcaggcgcggctgcggatagttatgcagctttttccagtccggcttgccctggaacaagtcgccctcccaccaggtggtgcccgcatcaatcgcttctttctcagtgcggctcatcggcggcatcaccttacggaaaccgcgaaataccggcgcggaaatcatgctcttacgcataggcgcaaagttaaatggcacgaggataatggccagaggcaccagtacccacgcgctccacagaccagcaacgccgagggcggctgtccaggcgagcaaaatcagactgctgataaataagctcacgcggtgatagaacaacgcgccgagcaggacaaccgtagcgagaatactcaaaatcatcataacgaaaagccccttacttgtaggaggtctgaccacttgtgatgatatggttgtagtggatgtaaaaacatttagcaatatgtttacaatataattacaacaaagctcacattgttgctgtttttatccgcacttcaggtcaaaaagtcctggtcatagcacctgcccgtacttctcgcttttggcggtatccggtacactgcattttgtctattacatttatgctgaaggatatcctcatgtaccaggatcttattcgtaacgaactgaacgaagcggcggaaacgctggctaactttttaaaagatgacgccaatattcacgccattcagcgcgcggcggtcctgttagcagacagctttaaagccggtggcaaagtgctttcctgcggcaacggcggttcccattgcgacgctatgcactttgccgaagagttgaccggtcgctaccgtgaaaaccgtccgggctacccggcgattgctatttctgacgttagtcatatttcctgcgtcggtaatgatttcggtttcaatgatattttctcccgctacgttgaagcggtaggtcgcgaaggcgatgtactgctggggatctccacctccggtaactctgcaaacgtgatcaaagcgatcgcagcggcgcgtgagaagggaatgaaagtgatcaccctgaccggtaaagacggcggcaaaatggctggcacggcggatatcgaaattcgcgtaccgcactttggttatgccgaccgcattcaggagattcacattaaagtgatccatatcctgatccagttgattgaaaaagagatggttaagtaagtctggcgtaggccggataagacgtttacgccgcatccggcatttgtgcgctgatgcctgatgcgacgctgacgcgtcttatcatgcctacaaatctgtacgcgaaccgtaggccgaataatgcgttcacgccgcatccgacctgaaaattcttaaatcaatcttcgccgggggccatgcgctcccgctgttgtggaggttacccatgtgcgaattgctcgggatgagcgccaacgtccctaccgatatctgctttagtttcaccgggcttgtacagcgtggtggtggaaccgggccacataaagatggctggggcattaccttttacgaaggtaaaggctgtcgcacatttaaagatccacaacccagctttaattcccccatcgccaaacttgtccaggactacccgataaaatcctgtagcgtggtggctcatattcgccaggctaatcggggcgaggtggcgctggaaaatactcacccatttacccgcgagttatgggggcgtaactggacttatgcccataacggacaactgacgggctacaaaagtctggaaaccggcaacttccgcccggtaggcgaaaccgacagcgaaaaagccttctgctggctcctgcataaattaacgcagcgttacccgcgcacaccgggcaacatggcggcggtatttaaatatatcgccagtctggcggatgaactgcggcagaagggcgttttcaacatgctgcttagcgacgggcgctatgtaatggcgtattgcagcactaatttacactggatcacccgccgcgcgccgtttggcgtggcaacgttgctggatcaggatgtggaaatcgacttcagcagccagaccacaccgaatgatgtggtcacggtgattgcaacacagccgctgacgggcaatgaaacctggcaaaagattatgccaggcgaatggcgcttattttgcctcggggagcgtgtagtttgattattttgcctcggggagcgtgtagttacttgccagttgtggctgcacaacttcgtggcttaacggcttgctgaccacgtaacgaccattgaccacagaaacggttggtggcttacgggtttgctcaaagtagtcgtaacccggcttcagttgctcccagaagtccttaaagttggaatatttatggcgcttcatattggcgtcggtcatgcggaacgggtaaatactcacttgcacgctcggctgaccaaacaccagcgcaccagtaacgaactggaatatctcatcaataccctgattggtcattgcgtagcagccgatggaaacacaatcgccgtggatcatcaggtatttcccttcataaccatgcgcacggtcataggcattggggaaaccaatattaatcgctttgtagtaacggctgtctggttttaactgattacgctggacgctataaaacccttccgggcttttgaaatcgccctgacgctgttttggccctaagccgccggaatatttacagattttatagctgtcgagcagttgatattgctcgcccattttgacgtagagatcgagcgtacgttcttccttgaagatctggatgtagacaggggatcccatcaactgctgcttatactctttgctcacaggcgtggtagagctactgctgcccagcaaaccggcaaaactaacgcacgggatcaacaacatcgcaagaattaatgcgattttacgcatactgcttattccttgataaaacggttacacacgccaggacggcaaaatggatcccaaatcggaatagtctggatttggaaggctcacattatcaccaaaagagttttacgcaagcctgtcggcgcagggtttacaaatttcatcggaagcgggctttacccaaagagcgccgcgtgagttccagttctctcaaatcgtaaaagtttatcggtaagtttgtaaatcaggatccagtccggttcgacatgagcatcgcgataacctttccaactaccttgcagcgggtggtctttataaacagctggaagcggtaaagtattattgataagaagcgtcataagatatttcaatttattcatatccttatgacgcttttgtgcaagttttacatccttactatattgtccgctgtattcaatatccctttgaatcatatttaaattcctaatttatcaaataaatcatcggcgtctttggccttatgaacatcaatgccagcttcgctgtttttgatactttgaatggttaattgattaggctcgcgtaaatcaaacggcaatgccttttcacgcgcgacctttgtgagggttatgcgaaccaggtcagagatggtcagccccatcccggccagtacgtccgctgcctgattcttcagatcttcatcgattcgggcgcgaacaaacgcgttagcagccattggggtatctcctgtgctgtatatttattcagcttgaattgtagctcaaatgagcaacagcgacaatccatgagtaatttaataaacggatgtttttacataattaactgaaatatatatgttaattttataataatggtttattaagtttgttcagaaacgatccgggatacactgcaacattaaagcatgaccagccattattgagtatgtccttgccgagcattccatcctttgtattgagcggattactgttgatttgtttgccgttttctagttttgccagcgccaccacaagtcatatctctttcagctacgccgcccgccagcggatgcaaaaccgtgcgcgtttattaaaacagtaccaaactcatctgaaaaagcaggccagctatattgtggaaggcaatgccgaaagcaaaagggcgctacgccagcacaaccgggagcagataaaacagcatccagaatggtttcctgctccgctcaaggcgagtgacagacgctggcaggcgctggcggaaaacaaccactttttaagcagcgaccatctgcataacattaccgaagtggcgattcaccgcctggagcagcagcttggcaagccttacgtctggggcggtacgcggcctgataaaggctttgactgtagcgggttggttttttatgcctacaacaagatccttgaggctaagctcccgcgcacggccaatgagatgtaccactatcgccgggcaacgattgtggcgaacaacgacctgcgccggggagatttgctgtttttccatatccacagccgcgagatagccgatcatatgggcgtgtatttgggcgatgggcaatttatcgagagcccacgtaccggcgaaaccattcggataagccgattagccgaacctttctggcaggaccattttttgggcgcgcgcaggattttgacggaagagacgattttgtaagacggataaggcgtttacgccgcatccggcagttgtacgcaggtgcctgatgcgacgctggcgcgtcttatcatgcctacgagcccgcgaatatttgcgagccgctttcccgatataaaacaacctcattgccaacctttccttttcttcttaccgttgagaaaaaggagtcgccatgtctgaatatcgtcgttattacatcaaggggggaacatggtttttcacggtgaatttacgaaatcgtcgaagccaacttttgaccacccagtaccagatgctccgtcacgccattattaaagttaagcgagacaggccttttgaaatcaacgcctgggtcgttttgccagagcatatgcactgtatctggacattacctgaaggcgatgatgatttttccagccgctggcgggaaattaaaaagcaatttacccatgcttgtggattgaaaaatatctggcaaccacgtttttgggagcacgccatccgcaataccaaagattataggcatcatgttgattatatttatataaatccagtaaagcatggttgggtaaagcaagtgagtgattggccattcagtacgttccatcgcgatgtcgcgcgagggttatatcccatcgattgggcgggggacgtaacggattttagtgccggggagcgtatcattagttaattgtgcgcagatgcctgatgcgacgctagcgcgtcttatcatgcctacaaacttgtgccggatcggtaggccggataaggcgtttatgccgcatccggcagttatgcgcagatgcctgatgcgacgctggcgcgtcttatcatgcctacaaacttgtgcctgaacggtaggacggataaggcgttcacgccgcatccggcagttgtgcaccaatgctggatacttacatcaacgcccccataatcttcaactccagctcatccggcacttcgttatacgacagcacatgcagccccggcgcaaacaaccttgcataacgcgccagcaaagggcgcagctgcggtggcaccagcagcaccgggtctttccccgccgctttcatctgctctttcacctgtggcatcgtactctggaactggttgagcatattcggatcgaccggcacgctgtcgagcatcactttcccgccctgttgcgcctgattcaccacgttggtcagcagattttccagctcattattcagcgtatacaccgtcagctcctgcttgcgaacgaacggatgggtaatgctgcgccgcaatgccaggcgcacatcggccgccagcagaatatgatctttcgtcaccgtgctactggcgaccagcacggtggcgatggtgacgatatcgcgcagggaaacgccttcggtcagcagcgcccggtacactttcagcaactggctgtaattgagcgccgcgctcaaatcttccgccagacgcggtgccgtcgacgataaacggttatgcaactgcgtaatatcatcatagttaaacaaatcaggaatatagctgcgcacaatcttatttacatgggtagcgatcacgctggcgctgtcgatcacctgataccccatattcagcgccttcgctttctgcgccgcctggatccaggtgaccggcatcccgtacgccgggtcgttcccctgcacgccgtcaatctcgccgtaggtttcgctggagggcagggccatcagtttatccgccggaatatccgcttcatcagcctttatgccgttgatgaaaatggcgtactgactgggcttaaggcggaagttttcccgaatgcggatctccggcagcagcacgccgttgccgtcagaaatcacctgccgcacgccgcgaatccgctgggtgagcgggttaccctgtgctttgtccaccagcgccaccagtttgtaaccgaggcttaaactgataggctcgatcagcggaatggtttcccaactgacctgctgctcgctggtttcggtgatggtgcgggtcagcgtttcgaggcttttctcttccgcctccgccgccagcggctgtttgctcatccgccagccggtaaaaccaagcagggcgctgaacagcaaaaacggcaggtgcggcattcccggtaccaccgccagcacgaacataatcccggtggcggtgtagagcaccgacgggcttgccagcagctggttacgcacgtcatgggcgatatcgccgttgtcgctgacgcgggtgacgataatcgccgccgcggtggagagcagcagggaagggatctgcgccaccaggccgtcgccgatggtcatcagcacatactgctggaaggcagcatcggcgctcaggttgtatttgaagatcccgatacagacgccgccgatcaggttgatcgccagaatcatcatcccggcgatggcgtccccgcgcacaaacttcgatgccccgtccatcgcgccgtagaaatcggcctcgctggcaacatctttacgccgggtttgcgcctgcgcctggttgatcaatccggcgttaagatcggcgtcaatcgccatctgtttgccgggcatcgcgtctaaggtaaagcgggcagaaacctcggaaatacgctcggcccctttggtgacgacaataaagttgattgtcaacagcgtcagtaaatccgagcgtgaaagcattatcgccgcgctgcacgggcagtcgatttttaacggtggtgggctgtcgccgttaaataaaatcagcccgtctcatccgccaaaacctgccaccgtggcggtgccggaagagacggagaaaaaagcgcgtgatgtgaatgagaaaacggcgctgctgaagaagaaatccgccaccgagcttggtgagctggcaaccagtatcaacaccattgcccgtgatgcgcatatggaagcgaatctggagatggagattgttccccagggattacgcgtgctgattaaagacgaccagaaccgcgatatgtttgaacgcggcagcgcgaagattatgccgttctttaaaacgctgctggtggagctcgcgccagtgttcgactcgctcgataataaaattattattaccgggcataccgatgcgatggcctacaaaaacaatatctacaacaactggaacctttcgggtgaccgcgcgctttcggctcgtcgggtgctggaagaggccggaatgccggaagataaagtgatgcaggtaagcgcaatggcggaccagatgctgctggattccaaaaatccgcaaagcgcgggcaaccggcgcattgagattatggtgctgaccaaaagtgcgtccgatacgctgtatcaatactttggtcagcatggggataaagtggtgcagccgctggtgcaaaagctggataagcagcaggtgctttcgcagcgaacgcgttaaatgctgaatctttacgcatttctcaaaccctgaaatcactgtatactttaccagtgttgagaggtgagcaatgcgtaaaatcattcatgtggatatggactgctttttcgccgcagtggagatgcgcgacaatcccgccctgcgcgatatccctattgctattggcggcagccgcgaacgtcggggggtgatcagcaccgccaattatcccgcgcgtaaatttggcgtacgtagcgctatgccgacagggatggcgctcaaattatgcccacatctcaccttgcttccggggcgctttgacgcctacaaagaagccagtaatcatatccgtgaaatcttcagccgctacaccagccgcattgaaccgttgagtctggatgaggcttatctcgatgtcaccgatagcgtccattgccacggttctgcgaccctcatcgcccaggaaatccgccagacaatcttcaacgagctgcaactgacggcgtctgcgggcgtggcaccagtaaagtttctcgccaaaatcgcctccgacatgaataaacccaacggccagtttgtgattacgccggcagaagttccggcatttttacaaaccttaccgctggcaaaaatccccggcgtcggcaaagtcagtgcggcaaaactggaagcgatggggctgcggacctgcggtgatgtacaaaagtgtgatctggtgatgctgcttaaacgctttggcaaatttggccgcattttgtgggagcgtagtcaggggattgacgaacgcgatgttaacagcgaacggttgcgaaaatccgtcggcgtggaacgcacgatggcggaagatattcatcactggtctgaatgtgaagcgattatcgagcggctgtatccggaacttgaacgccgtctggcaaaggtaaaacctgatttactgattgctcgccagggggtgaaattaaagttcgacgattttcagcaaaccacccaggagcacgtctggccgcggctgaataaagctgatctaatcgccaccgcgcgtaaaacctgggatgaacgccgcggcgggcgcggtgtgcgtctggtggggctgcatgtgacgttgcttgacccgcaaatggaaagacaactggtgctgggattatgatgtatactattatgtatattctggtgtgcattattatgagggtatcactgtatgcatcgaattctcgctgaaaaaagcgtcaatatcactgagttacgtaaaaacccagctaaatactttattgatcaaccggttgcggttctttctaataatcgccccgcaggatatctcttaagtgccagcgcattcgaagcgttaatggacatgcttgctgaacaagaggagaaaaagcccataaaggcgcgcttccgtccaagtgctgcaagattagaggaaattacacgccgcgctgaacaatatcttaatgatatgacggatgatgatttcaatgactttaaggaataaggatgcgggtattcaaaacaaaacttattcgcctgcaacttacagcagaggaacttgatgcgttaacggcggattttatttcctataagcgtgacggtgttttgccagatatatttggtcgcgatgcactctacgacgactcctttacctggccattaatcaaatttgagcgagttgctcatattcatctggcaaatgagaataatccatttccgccacagttgcgccaattcagcagaacgaatgacgaagcgcatttggtatattgtcagggggcgtttgatgagcaagcatggttgctcattgccattctgaaacctgaacctcataaactggctcgagataacaaccaaatgcataaaattgggaaaatggcagaagcgtttcgcatgcgtttttgaatttatattatgaataacatacaaataagaaactatcagcctggcgattttcagcaactatgcgctattttcattagagcggttacgatgaccgccagtcagcattatagtccacaacaaatttccgcctgggcgcagattgacgaatctcgctggaaggagaaactcgcgaaaagtcaagtgtgggttgcgatcattaatgcacaaccggttggttttatttcccgcattgaacattatatcgatatgttatttgttgaccctgaatacacccgccgtggggttgccagcgctttgttaaaacctttgattaagtctgaatccgaacttacggtggacgcaagcataaccgcaaaacccttttttgaacgttatggttttcagacagttaagcagcagcgcgttgaatgccggggagcgtggtttactaatttttatatgcgatataaaccgcaacattaaatccagcttgcaatgaaaataacgcccgcctggtatgtgcgcgttttctgattccacaaactgcaaggaggtaaatcatgacaaatcctttatcaatgactctttgcagacctttccaggattaattctttttttcttgccctggattcgtctgccatttcctgatttttatatttatatactctaaataattcgagttgcaggaaggcgacaagcgagtgaatcgccaggagcttacataagtaagtgactggggtgaacgaacgcagtcgcagtacatgcaacttgaagtatgacgagtataaatggaatggtacatgggcaaatatattcgtcccttatccgatgcggtatttaccatcgcatctgatgacctgtggatcgagagtttagcgatccaacaattacacaccacggcaaatttacccaacatgcagcgcgtagtggggatgccagatttacaccccggacgcggctacccgattggcgcagcgttcttctctgttggtcgtttttacccggcaagacgtcgcggtaacggtgctggaaacagaaacgggccgctactctgacacactgcgtagcgcgctggtttctctcgatggcgataacgcatgggcattaagcgaaagctggtgtggcactattcagtggatttgtccgagtccgtatcggcctcatcatgggcgcaaaaactggtttctgggcattgggcgttttaccgctgatgagcaggaacaaagcgatgcaatccgttatgagacgctgcgtagcagcgggccgggcggtcaacatgtcaataaaaccgacagcgcggtacgcgccacgcatttggcatccggtattagcgtgaaggttcagagtgagcgtagtcagcatgctaacaagcggctggcacgattgctgattgcctggaagctggagcaacagcaacaggaaaatagcgcggcgctgaaaagccagcggcgaatgttccatcaccagattgaacgtggcaacccgcgacggacatttacagggatggcttttatcgaaggataatgaaggatgaaactgccggaaggcgattaaacgccatccggcagcaaatcaaataattacttcgccggaatttctttcagcagttcagtcagcagtgtccagtaatgacctacgctttcgatgtgaacttgctcatccggagagtgtggaccggtgatagttggcccgatagaaaccatgtccatttccggatacggttttttgaacagaccacattccaggcccgcgtggataatctggatgttcggcgtcttgttgaacaggcgctgataggtttcacgtaccagatgcatcaccggagaattagcgtccggctgccagccaggatatgcgcctttcgcttcggttttcgcgccagccagtttacccaggctatccagcatgctcaccacgtagtctttaccgctgtcgatcagactacggatcaggcagtgaatttctacgttattgtcagtcatggtcaccacaccgacgttcagggaggtttcaaccacacctttggctacatcggagttacgaatcacaccgttcggggtggcgttcagcagacgaataaaggtatcgcgagatttcgcaatcagggcagctttatcgttcgctacagagtccagcaacaaggccagatttttctctttttctgccagctcgtttttcaggatctcctgataggtattcaccagagatttcaggacgtcgactttatcagctgcgacagcaatggtcgcaaaggcttcacgcgggatggcgttacgcagtgtgccgccgttgaaatcgataaggcgcagatccagttcttccgcatgacccgccaggaagcgcaccagcagtttgttggcattacccagcccaacgtggatttccccgccggagtgaccgcctttcagaccttttaaggttaacttgaaggtttcaaaaccagctggaaccgcttcacgatctaaatgcaggttggaggtgaagtcgataccccccgcacaacccatgtagatttcaccttcttcttcggagtcggtgttaatcagaatatcagcctgcaaccagttgccctgtaagccgaacgcaccgtccataccggcttcttcggtcatggtcagcagcacttccagcgggccgtgaaccacgttttcgtcagccagaaccgccagcgcagaggccataccaatgccgttatccgcacccagcgtggtgccgcgcgctttaacccattcgccatcaatataaggctggataggatctttcgtgaagtcatgcacggtgtcgttatttttctgcggcaccatatcgaggtgggcctgtaagacgaccggtttacgattttccatacctgcggtagcaggtttacgaatcaggatattacctacctgatcgcgttcgacatggaaacctttctcttttgcccaaccaacaatgtattcagcgagttgctcttcatgataggacgggtgaggaatagaacagattttggcaaaaatatcccacagcggctgtggagataattgagacagttcagacacgttaagtctccttgtcgatcacccgcaaaacagtattgcaggtcacagggttagcagaaaatgttgtcaacacaagacaggcttgcgagatatgtttgagaataccactttatcccgcgtcagggagaggcagtgcgtaaaaagacgcggactcatgtgaaatactggtttttagtgcgccagatctctataatctcgcgcaacctattttcccctcgaacactttttaagccgtagataaacaggctgggacacttcacatgagcgaaaaatacatcgtcacctgggacatgttgcagatccatgcacgtaaactcgcaagccgactgatgccttctgaacaatggaaaggcattattgccgtaagccgtggcggtctggtaccgggtgcgttactggcgcgtgaactgggtattcgtcatgtcgataccgtttgtatttccagctacgatcacgacaaccagcgcgagcttaaagtgctgaaacgcgcagaaggcgatggcgaaggcttcatcgttattgatgacctggtggataccggtggtactgcggttgcgattcgtgaaatgtatccaaaagcgcactttgtcaccatcttcgcaaaaccggctggtcgtccgctggttgatgactatgttgttgatatcccgcaagatacctggattgaacagccgtgggatatgggcgtcgtattcgtcccgccaatctccggtcgctaatcttttcaacgcctggcactgccgggcgttgttctttttaacttcaggcgggttacaatagtttccagtaagtattctggaggctgcatccatgacacaggcaaacctgagcgaaaccctgttcaaaccccgctttaaacatcctgaaaccagcacgctagtccgccgctttaatcacggcgcacaaccgcctgtgcagagcgcccttgatggtaaaaccatccctcactggtatcgcatgattaaccgtctgatgtggatctggcgcggcattgacccacgcgaaatcctcgacgtccaggcacgtattgtgatgagcgatgccgaacgtaccgacgatgatttatacgatacggtgattggctaccgtggcggcaactggatttatgagtgggccacccaggcgatggtgtggcaacaaaaagcctgtgcggaagacgatccgcaactcagtggtcgtcactggctgcatgcggctacgttgtacaacattgccgcctatcctcatctgaaaggagatgacctggccgagcaagcgcaggctttgagtaaccgcgcctatgaagaggccgctcagcgtctaccgggcacgatgcggcagatggagtttaccgtacccggcggtgcgcccatcaccggctttttgcatatgccgaaaggcgatggcccgttcccgacggtattaatgtgtggtggtctggatgcgatgcagacggactattacagcctgtatgaacgttattttgcgccgcgcggcattgcgatgctgactattgatatgccgagcgtgggcttttctagtaaatggaagctcacccaggactccagcctgttgcatcagcacgtcttaaaggcgctgcctaacgtaccgtgggtggatcacactcgcgtcgcggcctttggtttccgtttcggcgctaacgttgccgtgcgtctggcataccttgaaagcccgcgtctgaaagcggttgcctgtcttggtccggtagttcataccctgttgagtgattttaagtgccagcaacaggtgccggaaatgtatcttgacgttctggccagtcgtttggggatgcatgatgcttccgatgaagcgttgcgcgtggagctgaatcgctatagtttaaaagtgcaaggattgctgggacgtcgctgcccaacgccaatgttaagtggctactggaagaacgatccgttcagcccggaagaggacagtcgcttaatcaccagtagttctgctgacggtaaattattagagatcccatttaacccggtgtatcggaattttgacaaaggtcttcaggaaatcaccgactggatcgaaaaacgcttgtgttaaaaatttgctaaattttgccaatctggtaaaacagttgcatcacaacaggagatagcaatgacgttaccgagtggacacccgaagagcagattgatcaaaaaatttaccgcactaggcccgtatattcgtgaaggtaagtgcaaagataatcgattctttttcgattgtctggctgtatgcgtcaacgtgaaaccggcaccggaagtgcgtgaattctggggctggtggatggagctggaagcgcaggaatcccgttttacctacagttaccagtttggtctgttcgataaagcaggcgactggaagagtgttccggtaaaagacactgaagtggttgaacgactggagcacaccctgcgtgagtttcacgagaagctgcgtgaactgctgacgacgctgaatctgaagctggaaccggcggatgattttcgtgacgagccggtgaagttaacggcgtgagtgaaatgtgccggatgcatcacatccggcaatattcattaaaactgatacgtcatgccaaccgcgacaatatcatcattattaatattcaatttgttatcgctatccagttggttgattttataatcaacaaacgcactcatatttttgttgaaataatacgtagcaccgacgtcgatataattgaccagatcttcatcaccgataccttcaatatctttccctttgcttaagacataacccaggcttggacgcagaccaaagtcaaactggtattgagcgaccgcttcaaagttctgtgtcttattggcaaagccgccagttattggcgtcattttgcgtgtttcagaatagaaagttgccagataaatattattggcatcgtatttcagacctgttgcccatgcttctgcacgcttgcctgtgccacggctttgcaggttctgctcgttggtgcgatcactgttggtataggccccactaatggcgaaatcgctgccgccaaagtcatatgtcaaactcgtgccgaagccatcgccgttttgctttttaacgtcgcggttttcgtttttcccttgatattgcagggttaagttcaggccatcgataacgccgaagaagtcggtgttccgatacgtcgccagaccgctggcgcgtttggtcataaagttgtcggtctgcgcgctggaatcgccaccaaattccgggaacatatcggtccaggcttccacgtcatacaacgcccccaggttacgaccataatcgaaagaacccaaatctttatatttcaacccggcaaaagcgagacgcgttttttgctgtgcagtatcactctctgctttattaccggcaaactctgcttcccaacgaccataaccagtcagttgatcgttaatttgtgtttcgcctttgaaaccaaaacggatataactctggtcgccatctttactggcgttatcactcatataatgcatggctttaactttgccatagacatccagtttattaccgtctttattatatatttctgcagcctgtacagatgcagatgccacaatgcccatcaccactaatgccagagtgctctttttcattttcattcctgattttaattaacgcgcgaatattcagcgggagagtcccgttgaaaacaggaaagtttttaacctgagattgttaaagatatattacagattaataatattcttaaaatgtggtaatttattaaatctgtaataaaagcgtaaacaactgccgctaggcttgctgatcccgcgcaacaaaacgccatgctttgctcgcagatggttggcaaccgacgacagtcctgctaaaacgttcgtttgatatcatttttcctaaaattgaatggcagagaatcatgagtgacagccagacgctggtggtaaaactcggcaccagtgtgctaacaggcggaagccgccgtctgaaccgtgcccatatcgttgaacttgttcgccagtgcgcgcagttacatgccgccgggcatcggattgttattgtgacgagcggcgcgatcgccgccggacgtgagcacctgggttacccggaactgccagcgaccatcgccagcaaacaactgctggcggcggtagggcagagtcgactgattcaactgtgggaacagctgtttagcatttatggcattcacgtcgggcaaatgctgctgacccgtgctgatatggaagaccgtgaacgcttcctgaacgcccgcgacaccctgcgagcgttgctcgataacaatatcgttccggtaatcaatgagaacgatgctgtcgctacggcagagattaaggtcggcgataacgataacctttctgcgctggcggcgattcttgcgggtgccgataaactgttgctgctgaccgatcaaaaaggtttgtataccgctgacccgcgcagcaatccgcaggcagaactgattaaagatgtttacggcattgatgacgcactgcgcgcgattgccggtgacagcgttagtggcctcggaactggcggcatgagtaccaaattgcaggccgctgacgtggcttgccgtgcgggtatcgacaccattattgccgcgggcagcaagccgggcgttattggtgatgtgatggaaggcatttccgtcggtacgctgttccatgcccaggcgactccgcttgaaaaccgtaaacgctggattttcggtgcgccgccggcgggtgaaatcacggtagatgaaggggcaactgccgccattctggaacgcggcagctccctgttgccgaaaggcattaaaagcgtgactggcaatttcagccgtggtgaagtcatccgcatttgcaacctcgaaggccgcgatatcgcccacggcgtcagtcgttacaacagcgatgcattacgccgtattgccggacaccacagccaagaaattgatgcaatactgggatatgaatacggcccggttgccgttcaccgtgatgacatgattacccgttaaggagcaggctgatgctggaacaaatgggcattgccgcgaagcaagccagctataaattagcgcaactctccagccgcgaaaaaaatcgcgtgctggaaaaaatcgccgatgaactggaagcacaaagcgaaatcatcctcaacgctaacgcccaggatgttgctgacgcgcgagccaatggccttagcgaagcgatgcttgaccgtctggcactgacgcccgcacggctgaaaggcattgccgacgatgtacgtcaggtgtgcaacctcgccgatccggtggggcaggtaatcgatggcggcgtactggacagcggcctgcgtcttgagcgtcgtcgcgtaccgctgggggttattggcgtgatttatgaagcgcgcccgaacgtgacggttgatgtcgctagcctgtgcctgaaaaccggtaatgcggtgatcctgcgcggtggcaaagaaacgtgtcgcactaacgctgcaacggtggcggtgattcaggacgccctgaaatcctgcggcttaccggcgggtgccgtgcaggcgattgataatcctgaccgtgcgctggtcagtgaaatgctgcgtatggataaatacatcgacatgctgatcccgcgtggtggcgctggtttgcataaactgtgccgtgaacagagcacaatcccggtgatcacaggtggtataggcgtatgccatatttacgttgatgaaagtgtagagatcgctgaagcattaaaagtgatcgtcaacgcgaaaactcagcgtccgagcacatgtaatacggttgaaacgttgctggtgaataaaaacatcgccgatagcttcctgcccgcattaagcaaacaaatggcggaaagcggcgtgacattacacgcagatgcagctgcactggcgcagttgcaggcaggccctgcgaaggtggttgctgttaaagccgaagagtatgacgatgagtttctgagtttagatttgaacgtcaaaatcgtcagcgatcttgacgatgccatcgcccatattcgtgaacacggcacacaacactccgatgcgatcctgacccgcgatatgcgcaacgcccagcgttttgttaacgaagtggatagctccgctgtttacgttaacgcctctacgcgttttaccgacggcggccagtttggtctgggtgcggaagtggcggtaagcacacaaaaactccacgcgcgtggcccaatggggctggaagcactgaccacttacaagtggatcggcattggtgattacaccattcgtgcgtaaataaaaccgggtgatgcaaaagtagccatttgattcacaaggccattgacgcatcgcccggttagttttaaccttgtccaccgtgattcacgttcgtgaacatgtcctttcagggccgatatagctcagttggtagagcagcgcattcgtaatgcgaaggtcgtaggttcgactcctattatcggcaccattaaaatcaaattgttacgtaagatcttatcattctcccaccaaaaaattatcttaatgtaacagctggtgtaagtaaattctatcaacgaagatcaatcttatctactgaccaaaaaggcctgatagggcttcgctcactatacatccttggctgcaggtttagttgtacaccactcctaaatttaatgtgttggcaatgtgttcaataaagctcgaacaaattagctcattatgatcggttaatacttcaacttctggttgcatgattgtttgtccgtaaaaagataacgcgcctgccgggtagtagcaggcgcattacgcaataggtaaacaagggaggaagttcagaaatgtaaatcgggaaggttgtacgcaatgttcatcgtactacgttgttacggctttgccgcaacaagccagttgcctgccgcgctcgcagaatgtctgcagcccggagataaggagattgttcctgccagctaaatcccttcctgtcgatacgaaccagctcgtatttttctaccagaaaattcacggcatcggctagggtgataccggcatcgatagtctgtatcaggaatgttcgggttaaatatcagcaaaaagcccgcatcatgaatactggatatgaagcatgagagttacctcagtgtttatataaggattcggtccccctctctggaacggtaactctcaatctgatcggttcctgcgttagttcacatcacgactcattttttcgctctcaccggcatcccatttgccacaaaatatcccgccgtgctcctcggcagcgcttcctgtccacgaatcatatccgctattttctcgccaatcataattgtcgtggcgttcaaattcccggtgataatctgcggcataatgctcgcatccaccacacgcaggccttctaacccgtgtacgcggccttcgccgtcaaccacggacatctcgtcgtaacccattttgcaggtaccgcacggatggaaggcggtttcggcgtggttacgcacgaactcatcgagctgttcatccgtctggcattcgacaccggggctgatttcgcggccacgatactgatccagcgcgggttgatgcatgatctcgcgggtgatgcgaattgcgtcgcggaactcctgccagtcctgctcgtggctcatgtagttaaacagaatcgccggatgctggtgcgggtcgcgggatttaatccgcacatgcccacggcttgggctgcgcatactgccgacgtggcactggaaaccgtgctctttcactgcattgctgccgttatagttaatcgctactggcaggaaatggtactgaatattcggccacgcaaattcctcacggctgcgaataaatccacctgcttcaaagtggttgctggcaccaacgccagtgccgccaaacagccactccgcaccgattttcggctggttccaccactgcagggcagggtagagggaaaccggttctttgcactcatattgcagatacatctccagatgatcctgaagattttcgccgacgccgggtaattcatgcaccagcggaatatcaaactccgccagcagttcagcgttgccgacgccggagcgttgcaggatctgcggactggcaatcgcgcctgcacataacagcacttctttgttggccgttgcgcgggttgggatggtgctgtcgccttccagccattcgacgcccaccgcgcgtttgccgtcaaaaatgatgtgatcggtcatagcgtgagtacgaatggtcaggttaggacggcttttggcctgatcgagatagccacgcgcggtgctggcgcgacggccctgcggcgtgacggtgcgatccatcggaccaaaaccttcctgctgataaccgttgagatcgtccgtgcgcgggtagcccgcctgcacgcccgcttcaatcatcgcttcaaacagcggattgacgccgggtttggaggtagtgacgctcaccgggccatcaccgccgtgatagtcgttttcacccatatcgcgagtctcggccttgcggtagtagggcaggcagtcgaggtagctccagttctccagaccgggttcttgcgcccagttatcgagatccagcgcattgccacggatgtagcacatgccgttgatcaggctgcttccacccagacctttaccgcgtccgcactccatgcggcggttattcataaacggttcaggttccgtttcataggcccagttgtagcgtttaccctgtagcgggaatgccagggcagcgggcatctgggtgcggaagtcaaagcgatagtccgggccgcccgcttcaagcagcagcacggaggtattcggatcttcagtcagacgggtagcgagaacgttgccggcactgccggcaccaataatgatgtagtcaaattgcaaataaacctcctggttagaatatggactggaatttagccatctcaacctggatggacttcacctgggtgtaactctggagcgtcatcacgccgttctcgcgaccaatgccggagtgtttgtagccgccaacgggcatctctgccggggattcgccccaggtgttgatccagcaaatacccgcttccagctgatgaatgacgcgatgcgcgcggttcaggtccgctgtcacgatgcccgccgccaggccgtagtcggtatcgttagcgcggcgaatgacttcgtcttcgctctcgtaggtcagaatggacatcactggcccgaagatctcttcacgcacgatggtcatatcgtcgctgcaatcggtgaacactgtcggtgcaacccatgcgccgttatcgaagccatcgcctttcagtacatcgccgccgcacagtacgcgcgcgccttcctctttgcctttggcgatatagcgcagcacgttatcgcgatgcgggaagctgaccagcgggccgaagttagtttgcggatcgaaaacgtcgcccgcgcgaatgcgctcaacgcgcgccagaattttctgctcaaatgcggctttgcatttcgccggaacgaagacgcgggtgccattggtacacacctgaccggagctgaagaagtttgccatcatggcgatatcggcggcgagatcgagatccgcatcatcgaaaacgatcagcggacttttaccgcccagttccatggtcacttctttcagggaagaggccgcgctgttagccatcacttttttgccgctggcgacaccgccggtaaaactcactttggcaatgcccggatgctcggtcagatattgcccggtctccgcgcccacgcccggcaacacgttaaatacgccgtccggcaggcccgcttcgctgtaaatttcagccagctttaacgcggtaagcggggtaacttcgctcggtttgaaaatcattgcgttgcctgccgccagcgccggggcggatttccacagggcaatctggatcgggtagttccatgcgccaatccctgccactacgcccagcggttcgcggcgggtatacacaaaggacgtttcacgcaacgggatctggctgccttccagcgccgggatcagcccggcgtagtactccagcacgtccgcaccggtaacgatatcgacggtactggtttcgctatatgcttttccggtgtcgagggtttccagttttgcgagttcgtcattgcgttcacgcagaatatcaacggcccgacgcagaatacggctgcgctccatggcggtcatgctcgcccagattttttgcccctgctgggcgcttttcacggcgcgatcgacatcctcgcgcccggcggcctgcacggtcgccagcacgttaccgttggccgggttaatggtctcgaaggtgcgaccgctggtggcggaggtataaccaccatgtatataaagctgctgttctgccattcgggacatcacgtctcctcggttaatcggtgggtagatgctgagtgataaagtggcgggtcagggaattagcgcgggttttatccagcggtttgccgctcagagccgcgcgcagccataatccatcaatcagcgcggccaggccgtagcccgcttcctgtgcctgttcgcgcggcaattcgcgacgaaactcgctcaccagattgctcagcaagcggcggctgctgacctgctgtaaacgatagagcatcggctgatgcatactgctggcccagaacgccagccaggctttcatcgccgcactgctcacctgcgtttcatcgaagtttccgccaacaatcgcctgtaatcgctgctctgcactgccctgcggaagtgcatgtaatcgattcaaaaccgcgtcacgcagctgactggtgatatcgcgcatggttgcttccagcagaccatttttgtccctgaaatagtggctgatgatccccgtagaaacgcctgcacggcgggcgatctgcgcgatcgttgcatcgtgcatgcccacttcatttattgcttccagtgtggcgtcgatcagttgtctgcgccggatgctctgcatccccaatttgggcattttcgccactccattcatcagcggtgtttatctattaaagcggttattgattggacgttcaatataaaatgtgtcttaattgttacgaatttgattttaaatagtaacaataacagtggggatactggatgacagaccttagtcacagcagggaaaaggacaaaatcaatccggtggtgttttacacctccgccggactgattttgttgttttccctgacaacgatcctgtttcgcgacttcagcgccctgtggattggccgcacgctggactgggtttctaaaaccttcggttggtactatctgctggcggcaacgctctatattgtctttgtggtctgtatcgcttgtagccgttttggtagcgtgaagctcgggccagaacaatccaaaccggaattcagcctgctgagttgggcggcgatgctgtttgctgccgggatcggtatcgacctgatgttcttctccgtagccgaaccggtaacgcagtatatgcagccgccggaaggcgcgggacagacgattgaggccgcgcgtcaggcgatggtctggacgctgtttcactacggcttaaccggctggagcatgtatgcgctgatgggcatggcgctcggatactttagctatcgttataatttgccgctcaccatccgcagcgcgctgtacccgatcttcggtaaacggattaacgggccgataggtcacagtgtggatattgcagcggtgatcggcactatcttcggtattgccactacgctcggtatcggtgtggtgcagcttaactatggcttgagcgtactgtttgatattcccgatagcatggcggcgaaagcggcactgatcgccttgagcgtgataatcgccacgatctctgtcacctccggtgtcgataagggcattcgcgtgttaagcgagcttaatgtcgcgctggcgctgggattgatcctgttcgtattgtttatgggcgacactagcttcctgcttaatgcactggtgctgaatgttggcgactatgtgaatcgctttatgggcatgacgctcaacagttttgccttcgaccgtccggttgagtggatgaataactggacgctcttcttctgggcatggtgggtggcatggagcccgtttgtcggcttgttcctggcgcgtatcagccgtgggcgtaccattcgccagttcgtgctgggcacgttgattattccgtttaccttcacgctgttatggctcagcgtgttcggcaatagcgcgctgtatgaaatcatccacggcggcgcggcatttgccgaggaagcgatggtccatccggagcgcggcttctacagcctgctggcgcagtatccggcgtttacctttagcgcctccgtcgccaccattactggcctgctgttttatgtgaccagcgcggactccggggcgctggtgctggggaatttcaccagccagcttaaagatatcaacagcgacgcccccggctggctgcgcgtcttctggagcgtggcgattggcctgctgacgctcggcatgctgatgactaacgggatatccgcgctgcaaaacaccacggtgattatggggctgccgttcagctttgtgatcttcttcgtgatggcggggttgtataaatctctgaaggtagaagattaccgccgtgaaagtgccaaccgcgataccgcaccgcgaccgctggggcttcaggatcgcctgagctggaaaaaacgtctcagccgcctgatgaattatccgggcacgcgttacactaaacagatgatggagacggtctgttacccggcaatggaagaagtggcgcaggagttgcggttgcgcggcgcgtacgtggagctaaaaagcctgccaccggaagagggacagcagttgggtcatctggatttgttggtgcatatgggcgaagagcaaaactttgtctatcagatttggccgcagcaatatagcgtgccgggctttacctaccgcgcacgcagcggtaaaagcacctactaccggctggaaaccttcctgttagaaggcagccagggcaacgacctgatggactacagcaaagagcaggtgatcaccgatattcttgaccagtacgagcggcaccttaactttattcatctccatcgtgaagcgccgggccatagcgtgatgttcccggacgcgtgattgttattgcataaaaccgcgccatgtctgcatatggcgctgtttctcctacctcttgatacgttatatctatacggttaagcccttagtatctattgatgattaccagacaacagataataaaaaagaaaagaactattgcagcccaaaacctacatttgggctgttgcgaatgttcaataagtttagtcttatttaatgtaaatattgctgatcatttgaaatgacgcattattcatgagaaatgtgtatcgtaaatcaactgaaattaacgcaaccatttgttatttaaggtttaattatctgtgtgtgatattttattgaatgttttaaatattgtttttattggcattgctataatattggttatcatttgctgaatggattcagtcttaatgagtgggtttttaagggacaggcatagagtaatgatacgtatgcataaccaacatctttactcattatgtcattgaatgttgacgctatgtgtttatgagggagaggtattttcagttgatctggattgttaaattcatataatgcgcctttgctcatgaatggatgccagtatgtagtgggaaattataaatattgaaatagtccaactacttctttattaccaaaaatgagtatctgaattttaatattgcattcttgcgtgattatctcctgagtttgacttgtgattacctttttaaggtatttagcgtaactgtttttgagcgagcatcagaggtaaagataatcttcttgatagtgatgtgggatgttatacgtatggcatcgctgatgtttatggttaccccttatgtgtgctcaggaatcgacaggtaatcactcatactgaacagcgataaaagataaaggtgtgttcatgaatagttgtgattttcgtgtttttctgcaagagttcggtacaacggttcatttgagtttgcctggtagcgtatccgagaaagaacgactgctactcaagctgctgatgcagggaatgtctgtaacagaaataagtcagtacagaaatcgcagtgcaaagacaattagtcatcaaaagaaacagctctttgagaaactggggattcagagcgatattactttctggcgcgatattttctttcagtacaatccggagatcatatccgccacggggagtaatagtcacagatatattaatgataatcactatcaccatatcgtcacgcctgaagccatcagtctggcgttggaaaaccacgaattcaaaccgtggatccaaccggttttctgcgcgcagactggcgtactgacgggctgtgaggtgcttgtccgctgggaacatccacaaacgggaattatcccaccggatcagtttattcctctggcggagagttccggtcttattgtcataatgacccgccaactgatgaaacagactgcggatattctgatgccggtaaaacatttgctgccggacaatttccatattggcatcaacgtcagcgcgggttgttttttggcagcgggatttgaaaaagagtgtctgaacctggttaataaattaggtaacgataaaatcaagctggttctcgagctaacggaacgtaaccctattccggtaacgccagaagccagagcgatatttgacagccttcatcagcacaacattacctttgcgctggatgactttggtacgggttatgcgacctatcgttacttgcaggcgttcccggtcgattttattaagatcgataagagttttgtgcaaatggcgagtgtcgacgaaatctccggtcatattgtggacaatattgtcgaactagcgcgtaagcctggtctgagtatcgtggcggaaggggtagaaacccaggagcaggcggatttaatgatcggtaaaggcgttcactttttgcagggctatttgtactctccgccagtaccgggtaataaatttatctctgaatgggtaatgaaagcaggtggttgatgtaaaccgctattcacagcgcatcgggaggttggcagcgattaattctcccgatgcagtaaatcctgatagatccccgttaatatgccatttggcgcaaattgttttttaatccactgcgtcacctgacccgtagcagaatgctgagtcgccagtaacatgcggctatcctggcgcggattatggatttgtcgggtaaccagcagggattgcgtcatcgcctcacggaccatgtaatccggcaaaaaaccaattccttcacctaaaatctggcactgacatttggtgttgaaatctggcaccagaatactctcctgcccgtgcagcaaccagcccacttttttattaatcgtatgcgcggtgtcctccaccataatattagggtagagacgcagttggctttcggcgatgggttccggcacaaaggctaacgggtgatccggggcgatagcaaaagcccagcgaatcgcgccaatttcagtgtaatcaataccgccgccgtccagtagtgtatcgggtgcgccgatggcgatattggcctgattattaataatcgcatcccagacgccgttatacacttcggtggtgacggtaatctggcaggtaggaaactgctttttcagcacctgtaacaagcgtgcggtgtgtttgggcgtataaagcagctgattaatacaaatgcgcacacgcgcttctatgccctggctaatagtatcgattctgcgtttgatggcataaaaatcattcagcaggtcggtagctttgcggaaaaaataacgcccggactccgttaactcaatgctgcgggtactgcgagtgaacagcaccacatccagccccgtctccatacgcttaatggtgtagctaatggcggaagtggttaaacccaactcttctgcggctttactgaagctgccaaaacgcgcagcggtagtaaatgccaacagattctcttcggtaaaaatactgttcattaaaccattctcgccattatctactatgaatttctccagctatgactgtagaggtatcggttaaagatagataatcatttttgaataacttttaatacccgtcgcgtttagtcgtcgcttcgcttaatttttgtccaccatattcactaattacccccacgcagttacccgccagaaaacccagtaacgtcaccgtccagttcatcccgctggcaaaaaacagcgtcatgccgagaaagccaccgggaataaaggacagtaaccagaaacgcccttgccagaccactaccgcgctgaagggtacggtagtaattacgctcgcccagaacgcggacagtccacttacagaggccagccaaccagcagtcagcgcggcgaaaaacgcccacaccatcccggaataattaaccgccagacttctgataaacccgcttttaccgccgcctgcggcataaaaactgcaaaaggcgacgaagccaatggttcctaataattcccatccttgagagagcccgacatgactagacactaactgccaaagccctgcacaaataccgacggtgacacccgttgccgtgagtccgttcatcttgttcccctctggttagacatggacgaaagctactcttacatgtgcagactatagagaaataaaacctgattgagtgaaagggtatcgggtcaaagaaacaaatattgcactaccgcacactgcgaaaagattgttgaatattattcaacaaaaaggcgagatacggcgaattaaatttaagcgggttcttttatcagattatcgttgctattctcaattcatcgaaaacagccacaaaaaccaggggaatgtgaatgagtataaaaaatctacctgccgactatttattggctgcacaacagggtgatatcgataaagtaaaaacctgccttgcgctgggtgtcgatattaatacctgcgatcgtcaggggaaaacggcaattacgctggcaagtttatatcagcaatatgcttgcgttcaggcattaattgatgccggagcggatattaataagcaagattatacctgtttaaatccttttttaattagctgtctgaacgatgatttaacgctactacgaattattttaccggctaaacccgatcttaattgcgtaacccgttttggcggtgtcggcctgacgcctgcctgtgaaaaaggccatttaagtattgtaaaagagcttttggcgcatacggagattaacgttaaccagaccaaccatgtaggctggacgccgctactggaagcgattgtgcttaatgatggtggtattaaacagcaggcgattgtgcagttattgctggaacacggtgccagcccgcatctgaccgataaatatggcaaaacgccactggaactggcgcgggaacggggctttgaagagattgcgcagttactgattgccgcaggtgcataaaccgggaggcttgctatcaacacaccagaaagacggtgtgtgtgggcgctaactgcggatgcggattttctggcgcagcgggggcaaggacaggttgaacaggtctttgccagagcggtaaatatcgcactcccggctcgccagcagttgctgacgctgctttgtgaagagtacgacaatgcgccaaacagttgtcggttggcactcactcactttgatgatctgttccggcatggtgataaggttcagtttgacgatcaaggtattacggttggtcaacatcttcatatagagatgagtcgttgtcggcgttggctgtccccaaccttgcaaatgaccgctgtgaattttcaccttatcgcctggctacagtggcacgacattattcatcagcacctgggggaaaatgaaaccctgtttaattatcgcggcgataatccgttttatcaggcgttaaataaagaattacatattaaacgacgggcagttattcaggccgtaaacgataaacaaaatatcgccagtgcggtcgccagtatgatggggttagggattggccttacgccaagtgccgacgattatttaacaggtctggcgcttattttatttattcccgggcatccggcggaaaaatacaaagaggaattttatctcggtctgcaacgcggcaaaaataataccacattattaagtgccataacgctggaagccgcattacaacaacgctgccgggaaaatattcatcgttttattcacaacattatttatgacatccctgggaacgcaactcaggcaatagaaaaaattaaacatattggctccagttccggctgcgacatgctgtatggcatggccgatggttgtgcgctgagccaaacctacggagggaattatgtcagttaattaaccaaacctacggagggaattatgagtgttaaaatagtcattaaaccgaatacctattttgattctgtcagcctgatgtctatctccacgcgtgcaaataaactcgacggcgtcgagcaggcatttgtggcgatggcgaccgaaatgaataaaggcgtgctgaagaatttaggactgctgacgccggagctggagcaggcgaaaaacggcgacctgatgattgtcatcaatggtaaaagcggtgcggacaacgagcagttactggtggagattgaagaactgttcaacaccaaagcgcaaagcggcagccacgaggcgcgttacgccactattggcagcgccaaaaagcatatcccggaaagtaacctggcggtgattagcgtcaacggtctgtttgccgctcgcgaagcgcgtcaggcgctgcaaaacgatctcaacgtgatgctgttttccgataacgtcagtgttgaagatgaactggcgctcaagcaactggcccacgaaaaagggctgctgatgatggggccagactgtggcacggcgattatcaacggcgcggcgctctgttttggtaacgccgtgcgtcgcggcaacatcggtattgttggcgcatccggcaccggcagtcaggagttgagcgtccgcattcatgaatttggcggcggcgttagccaactgattggcaccggcgggcgcgacctgagcgagaaaatcggcggcctgatgatgctcgacgccatcgggatgctggaaaacgatccgcaaactgaaatcattgcgcttatctccaaaccgcctgcgcctgcggtggcccgcaaagtgctggaacgtgcgcgcgcctgccgcaagccggtggtcgtctgcttcctcgatcgtggcgaaacgccagtggatgagcaggggctacagtttgcccgcggcaccaaagaggcagcgctaaaagcggtgatgctctccggcgtgaaacaggaaaatctcgacctgcatacgcttaaccagccgttgattgcggatgtgcgtgcgcgtctgcaaccgcagcagaaatacattcgtggcctgttctgcggcggcacgctgtgcgacgaaaccatgttcgcggtgatggaaaaacatggcgatgtctacagcaacattcagcccgatccggaattccgcctgaaagatatcaaccgcagcatcaaacacaccttcctcgactttggcgatgacgacttcaccaatggcaagccgcacccgatgattgaccccaccaaccgcatcagtcgcttgatcgaagaggcgcgcgatccagaagtggcggtgatcgtgatggattttgtgctcggatttggaagccatgaagatccggtcggctccaccatcgagacgatcaaagaagcgaaagcgatcgccgctgccgaaggacgcgagttgatcattctcgcctatgtgctgggtaccgatcttgatacgccaagcttagaacaacaaagccagatgctgcttgatgccggagtgattctggcgagcagcagcaccaataccggattgctggcgcgtgaatttatctgcaaaggggaggaagcctgatgagccagagtctgtttagccaaccattgaacgttattaacgtcggcatcgccatgtttagcgatgacctgaaaaagcagcatgtagaagtgactcaactcgactggacgccgccggggcagggcaatatgcaggtggtgcaggcgctggataacattgccgatagcccgctggcggacaaaatcgccgccgctaaccagcaggcgctggagcgtattatccagagccatccggtgctgattggttttgatcaggcgattaacgtggtgccgggcatgacggcgaaaaccattcttcacgccgggccgccgatcacctgggaaaaaatgtgcggcgcgatgaaaggcgcggtcaccggagcgctggtgttcgaaggactggcgaaagatctcgacgaggcggctgaactggcggcttccggggagatcaccttcagcccgtgtcacgagcacgactgcgtgggaagcatggcgggtgttaccagcgccagcatgtttatgcacatcgtaaaaaacaaaacctacggcaacatcgcttataccaacatgagcgagcagatggcgaagattttgcgtatgggcgctaacgaccagagcgtgattgaccgcctgaactggatgcgtgatgtgcagggaccaatactgcgcgacgcgatgaaaattatcggcgaaatcgatctgcgcttaatgctggcgcaggcgctgcatatgggcgatgagtgccataaccgcaataacgccgggacgacactgctgattcaggcgctgacgccggggattattcaggcgggttattccgtcgagcaacagcgcgaagtgtttgagtttgtcgccagcagcgactacttctccggcccgacgtggatggcgatgtgtaaagcggcgatggatgcggcgcatggcatcgaatacagcaccgtggtcaccaccatggcgcgtaacggcgtcgagttcggcctgcgggtcagcggcctgccggggcaatggtttaccggcccggcgcagcaggtgatcggcccgatgtttgccggttataagccggaagatagcgggctggatatcggcgacagcgccatcaccgaaacctacggtattggcggatttgctatggcgaccgcgcccgctatcgtcgcgctggtgggcggcacggtggaagaagctattgatttctcccgtcagatgcgcgaaatcaccctcggtgaaaaccccaacgtcaccattccgctgctcggttttatgggcgtgccgagcgcaatcgacatcacccgcgtgggtagcagcggcattctgccggtgatcaacaccgccatcgcccataaagatgcgggcgtcggcatgattggcgcgggcattgtgcatccaccttttgcctgcttcgagaaagccattcttggctggtgcgaacgttacggcgtctgacctacatgttcatgccggatgcggcgtgaacgccttatccggcctacgaatggcgcaagaatctgtaggcctgataagcgtagcgcatcaggcatttgtcaccattgccggatgcggcgtgaacgccttatccggcctacgaatggcgcaagaatctgtaggcctgataagcgtagcgcatcaggcatttgccaccactgccggatgcggcgtggacgccttatccggcctacgagtggcgcgagaatctgtaggcctgataagcgtagcgcatcaggcatttgtcaccattgccggatgcggcgtgaacgccttatccggcctacgagtggcgcgagaattgtaagcctgataagcgtagcgcatcaggcagtctggcgttggtcataaccccatcaccctctgtagcggacataacaacatgaaagagcttgtggtcgttgccattggtggcaacagcattatcaaagataacgccagccagagcattgagcatcaggcggaggcggtgaaagccgtcgccgatacggtgctggaaatgctggcttccgattacgacattgtgctgacccacggcaacgggccgcaggtcgggctggatttacgccgtgcggagattgcccacaagcgcgaagggctgcccttaacgccgctggcgaactgtgtggcagatacgcagggcggcatcggctatctgatccaacaggcgctgaataaccggctggcgcgtcacggcgagaagaaagccgtcaccgtggtgactcaggtggaagtggataaaaacgatccaggttttgcccatcccaccaagcccatcggcgcattctttagtgacagccagcgtgacgaattacaaaaggcaaaccctgactggtgttttgttgaagatgccgggcggggctatcgccgcgtggtcgccagcccggaaccgaaacgtattgtcgaagcacctgccattaaagcgctgatccaacaaggttttgtcgtaattggcgcgggcggcggtggaattccggtagtgcgtactgacgcgggagattaccaaagcgtggacgcggttatcgacaaagatctctctaccgcgctgctggcccgtgaaattcacgccgacattcttgtgatcaccactggcgtcgaaaaagtgtgtattcactttggcaaaccgcagcagcaggcgctcgatcgggtggatattgccaccatgacccgctatatgcaggaagggcatttcccgcccggcagcatgttgccaaaaatcatcgccagcctgacatttttagaacaaggcggcaaagaagtgattatcaccacgccggaatgcctgcctgcggcgctgcgcggcgaaacgggcactcatattattaaaacgtaaggacgtaagatgaaagaaagcaatagccgccgtgaatttctgagccagagcggtaagatggtcaccgccgccgcgctgtttggtacctctgtgccgctcgcccatgcggcggtagctggcaccctaaactgcgaagcgaacaacaccatgaaaatcactgacccgcattactatctcgataacgtgctgctggaaaccggttttgactacgaaaatggcgtggcggtgcagacccgcacggcgcgccagaccgtggagattcaggacggcaaaattgtcgccctgcgcgagaacaagctgcatccggacgccacgctgccgcactatgacgctggcggtaagctgatgctgcccaccacccgcgacatgcatattcatctcgacaaaaccttttacggcgggccgtggcgcagcctcaatcgtccggcaggcaccaccatccaggacatgatcaaactcgagcagaaaatgctgccggaactgcaaccgtacactcaggagcgggcagaaaaactgattgatttattgcagagcaaaggcaccaccattgcccgcagccactgcaatatcgaaccggtttccggcctgaaaaatctgcaaaatttgcaggcggtgctggcgcgacgtcaggcgggctttgagtgtgaaatcgtcgccttcccgcagcacggtttgctgctgagcaaatctgaacctttaatgcgtgaagcgatgcaggcgggggcgcattacgtcggcggcctggacccgaccagtgttgatggcgcgatggaaaaatccctcgacaccatgttccagattgcgctggactacgacaaaggcgtcgatattcacctgcacgaaaccactccggcaggcgtggcagccatcaattatatggttgaaacggtagagaaaacgccacagctgaagggcaagctgaccatcagtcacgcctttgcgctggcaacgctcaacgagcaacaggtagatgaactggcgaaccggatggtggtgcaacaaatttctatcgccagcacggtgccgattggcacgctgcatatgccgctcaaacagttgcacgacaaaggcgtaaaagtgatgactggcactgacagcgttatcgaccactggagcccttatggtctgggcgacatgctggaaaaagccaatctgtacgcgcagctctatattcgtcctaacgaacagaacctctcccgcagcctgtttttagccactggcgatgtattgccgctgaatgaaaaaggcgagcgtgtatggccaaaagcgcaggatgacgccagctttgtgctggtggacgcctcctgttccgccgaggcggtggcgcgtatcagcccgagaaccgcaacgttccataaagggcaactggtgtgggggagtgtggcaggttgatgcgcatttgaaacgcctgcaacggtgaatagtaagagatttaagccccagggagtggggcaatctgaatatgagtgtgtcggcagaaatggacattatctttgaggaatatgcccttattgacgttgtgtagataactatttgtctacgtgaaaagatcatcagttttgccgattttagtcttttacagatagcaaatatcacacttacaggcgctcgccttatggggaacgttgctgctctgtttcattcaggctcgcggcatgttggggctggatcgggtggtttaaatattggctatattcaatggacgcgttttgccgcgatgacatatcaggcgttgccaaatacacatagctaatcaggagtaaacacaatgaagatcaaagctgttggtgcatattccgctaaacaaccacttgaaccgatggatatcacccggcgtgaaccgggaccgaatgatgtcaaaatcgaaatcgcttactgtggcgtttgccattccgatctccaccaggtccgttccgagtgggcggggacggtttacccctgcgtgccgggtcatgaaattgtggggcgtgtggtagccgttggtgatcaggtagaaaaatatgcgccgggcgatctggtcggtgtcggctgcattgtcgacagttgtaaacattgcgaagagtgtgaagacgggttggaaaactactgtgatcacatgaccggcacctataacagcccgacgccggacgaaccgggccatactctgggcggctacagtcaacagatcgtcgttcatgagcgatatgttctgcgtattcgtcacccgcaagagcagctggcggcggtggctcctttgttgtgtgcagggatcaccacgtatagcccgctacgtcactggcaggccgggccgggtaaaaaagtgggcgtggtcggcatcggcggtctgggacatatggggattaagctggcccacgcgatgggggcacatgtggtggcatttaccacttctgaggcaaaacgcgaagcggcaaaagccctgggggccgatgaagttgttaacagtcgcaatgccgatgagatggcggctcatctgaagagtttcgatttcattttgaatacagtagctgcgccacataatctcgacgattttaccaccttgctgaagcgtgatggcaccatgacgctggttggtgcgcctgcgacaccgcataaaagcccggaagttttcaacctgatcatgaaacgccgtgcgatagccggttctatgattggcggcattccagaaactcaggagatgctcgatttttgcgccgaacatggcatcgtggctgatatagagatgattcgggccgatcaaattaatgaagcctatgagcgaatgctgcgcggtgatgtgaaatatcgttttgttatcgataatcgcacactaacagactgaaaaaattaataaataccctgtggtttaacatattaacttcgctctccacttaactttttagttaaggagagcgaaataatatcaaagtagcagtaaaacctataacgtaaatttaaattgttaaattaacgccctccagtacacaatacttcacacgttagttatgagcgatttctgatagtgcctggtttaatcagagctttattatctgcgacgtttatttttatttaagagagatcgcgatgataagtttaaaagctccgcacaataatttgatgccatatacgcaacaaagcatacttaatacggttaaaaacaatcagttaccagaggatatcaaaagctccctggtttcctgtgtcgatatattcaaggttttgattaaacaatattatgattatccttatgattgtcgtgatgatttagtcgatgacgacaaactcattcatctcatggctgccgtacgagactgtgagtggagtgacgataacgcactcaccataaatgtgcagtttaatgatttccctggattttatgactggatggattaccctgatcacccggttaagtttgtttttcacatacttgaaaatcaaaaagggacagtttgggtatatgaccaggatgatgcgtttcttgatattaaagcaaacgtgcaggctggacgctttaccgggcttaagaaattagtgcagtttatcgatagtgtgcgaacagattgcaaatgtattcttcttgaataccatatgcctttgctgagaattttccctaaagggaaagagtgtatgcatgtggaaaaatggcttcgcgaaatgagctctattccggagacagacgcgcccattaagcaggcgcttgcgcatggattattattacacttaaaaaatatctaccctgtttttcctgaaagtctggtgatgttattgctctctgttctggacgtaaaaacatacagagatgatgcgcgattaaatgaatggatatctaatagagtgcaggaattaggtgacagatattatcctgtaaataagcacgttaaaatccgctacactctttaattcagaaagggttccacctgcaagttgttattccacctgagagtgaatcgcaatgcaggtaatcatttcatctgtatatctgtatgccaactggcattccatctcttttttcgccgatattttgttgtgatcggcgacacttcgcttaaaaaagcaccagtagtggtttcgcagccatgcggtgtataaaaaatgatctcatgcagatgttttgtgaatgtgttggttgacattcatatgaaaaaaatcataattccatcatgtttgtgtggggtcttttctgtatcttacgcatcgcactcaagcctgacagaaaatatgctgtaaggctcatatcaaaaaccgccattagctcatcaggaagagcagacgacaaccaggattgttgtatggtacggggttcgaggcctcgatggcggtccaacttttcaaaactcttctgaatcagatccccttattaagttccctgcaaagtggaacattgccattgtttggctatagtggatggggcagaccaatgaaaaaagcccacacaggggagagtgggctgaaatgggaagctaaagacagtagtaaacttatcggaaataaggaccacgcattacgggggctaagtagcccgatggccgtgattcggcaaatcaggttgattacgtaaagagtaaattatctgctcaccgctgcgtcaccccttcgtaaatcaggcgtagcgcgaatacaccaataattgcaccaataacccgactggcaacgcgttgcatacgcccataagcacgacgcacagcgggcaaagaaaacgcctgactaagaaaaactcgccagataatacttgcgagcacaatccccgcccaggccattaaacgtgcccatgttggtgtttctgcatttaatgttacactgaaaatactgataaaaaataaaacggtttgcgggttagagagatcggtaattaatccgcggcgaaaaaagacataccagggggcgctaatcggttgttgtagtgtgctcatttgcggtgtactctggcggcgcatgctgcaccacgcaaaccataagagataagcgccgccgacgattctgataaggctaaaaatctcctcacactgcgtaattagcgttgcaagaccaaacaaacccaacccggaataaaatgcatcgcccagcgccacgcccagcccggtcagcacccctgcgcgtcgaccggaagccaggctggtttgtactaccacaaagagattggctcccggattaaaaaaagtaatcacgaacagtcctacggtcaggtaaacggcatgcaaaggatccatagtgatttcatccataaataagtgaactaactgcatcatatttctaccaaaaataatcgggtgcgagagagatcacaaagtgtcttatttccggttactggcgtttatgccctgactgaactaattattaatcaacccaataatgtgggtgggtgatagtgtgataacaactctggagccgtaatatgaaaataatctctaaaatgttagtcggtgcgttagcgttagccgttaccaatgtctatgccgctgaattgatgaccaaagcggaatttgaaaaagttgaaagccagtatgaaaaaataggtgatattagtaccagcaatgaaatgagcactgcagatgcaaaagaagatttgatcaaaaaagcggatgaaaaaggggctgatgtgttggtactgacctccggtcaaactgacaataagatccacggcacggcaaatatttataagaagaagtaattctgaatcctatgtaaacatctccgatgcgtaagtttatcggtgatcatctattgaaatttatgccggataaagcgttcgcgctgcattcggcagttcagcttttcagccgccgccagaacgtcgtccggctgatgcctaaataattcgccgctgctgttttatcgccattaaatttctccagtgcctgttgtggtgtcagtaagcgtggagcgggagttttcgcgctctcgcgcgccagttccggcagtagcagttgcataaactgcggcgttaaatccggcgtcggttccacacttaaaaacagcgccagtcgttccatcatattgcgcagttcacgaatattgcctggccagtcgtagtgcagcagcacagtttcacttgcctgtaacccctggcgtaatgcagcagaaaatggggcggagagcgccgccagagacactttcaaaaagctttccgccagcggaagaatatccgccacccgctcgcgcagtggtggcaattgcagacgcaaaatactcagccgataaaacagatcacggcgaaaacgtccttgctgcatatcttcttccagattgcagtgagtggcgctaatgacccgtacatctaccggaacaggctgatgcccgccgacgcgggtgacctctttttcttccagcacccgcagcagccgggtctgcaaaggtagcggcatttcgccaatctcatccagaaacagcgtaccgccgtgggcaatttcgaacagcccggcgcgacctccgcgtcggctgccggtaaacgccccttcctcatagccaaacagttctgcttccagcaggctttcggcaatcgccccgcagttgacggcaacaaacggatggctctttttgccctgtcgcgcatcgtggcgggcaaaatattcccgatgaatcgcctgggccgccagctctttgcccgtccccgtttccccctcaatcaacaccgccgcactggagcgggcatacagcaaaatagtctgccgtacttgttccatctgtggactttgaccgagcatatcgcccagcacgtaacgagtacgcagggcgttgcgggtggcatcgtgagtgttatggcgtaagctcatgcgcgtcatatccagcgcatcgctgaacgcctggcgcacggtggcggcggaatagataaaaattccggtcattccggcttcttctgccaaatcggtaatcagccctgcgccgaccaccgcttcggtgccgttagcttttagctcgttaatctgcccgcgtgcgtcttcctcggtaatgtagctacgttggtcgaggcgcaaattaaaggttttttgaaacgccaccagcgctggaatggtttcctgataggtgacaacgccgatagaagaggtgagttttccggcttttgccagtgcctgtaacacatcgtagccgctcggtttaatcaaaataactggcacactcaggcggcttttcaggtacgcgccgttagagccagccgcgatgatggcgtcacagcgttcgtttgccagtttcttgcggatgtaggtcactgctttttcaaagccaagctgaataggggtaatgttcgccaggtgatcaaactcgaggctgatatcgcgaaacagctcgaacaggcgcgttacagataccgtccagataaccggtttgtcgtcattaagccgtggtggatgtgccatagcgcaccgcaaagttaagaaaccgaatattgggtttagtcttgtttcataattgttgcaatgaaacgcggtgaaacattgcctgaaacgttaactgaaacgcatatttgcggattagttcatgactttatctctaacaaattgaaattaaacatttaattttattaaggcaattgtggcacaccccttgctttgtctttatcaacgcaaataacaagttgataacaaaggatgggctatgtctctacactctccaggtaaagcgtttcgcgctgcactgactaaagaaaatccattgcagattgttggcaccatcaacgctaatcatgcgctgttggcgcagcgtgccggatatcaggcaatttatctttctggcggtggcgtggcggcaggtagcctggggctgcccgatctcggtatttctacccttgatgatgtgctgaccgacattcgccgtatcaccgacgtttgtagcctgccgctgctggtggatgcggatatcggttttggttctagcgcctttaacgtggcgcgcaccgtgaaaagcatgattaaagccggtgcggcaggattgcatattgaagatcaggttggtgcgaaacgctgcggtcatcgtccgaataaagcgatcgtcagcaaagaagagatggtggatcggatccgcgcggcggtggatgcgaaaaccgatcctgattttgtgatcatggcgcgcaccgatgctctggcggtagaggggctggatgcggcgatcgagcgtgcgcaggcctatgttgaagcgggtgccgagatgttgttcccggaggcgattaccgaactcgccatgtaccgccagtttgccgatgcggtgcaggtgccgatcctcgccaacatcaccgaatttggtgccacgccgctgtttaccaccgacgaattacgcagcgcccatgtcgcaatggcgctgtacccacttagtgcgttccgcgccatgaaccgcgccgctgaacatgtctacaacgtcctgcgccaggaaggcacgcagaaaagcgtcatcgacaccatgcagacccgcaacgagctgtacgaaagcatcaactactaccagtacgaagagaagctcgacaacctgtttgcccgtagccaggtgaaataaaaaacgcccgttgattgtattcgacagccgatgcctgatgcgtcgctgacgcgacttatcaggcctacgaggtgcactgaactgtaggtcggataagacggatggcgtcgcatccgacaaccgatgcctgatgcgccgctgacgtgacttatcaggcctacggggtgcactgaactgtaggtcggataagacgcatagcgtcgcatccgacaaccgatgcctgatgcgccgctgacgcgacttatcaggcctacggggtgcactgaactgtaggtcggataagacgcatagcgtcgcatccgacaaccgatgcctgatgcgccgctgacgcgacttatcaggcctacggggtgaactgaactgtaggtcggataagacgcatagcgtcgcatccgacaacaatctcgaccctacaaatgataacaatgacgaggacaacatgagcgacacaacgatcctgcaaaacagtacccatgtcattaaaccgaaaaaatctgtggcactttctggcgttccggcgggcaatacggcgctctgcaccgtgggtaaaagtggcaatgacctgcattaccgcggctacgatattcttgatctggcgaaacattgcgaatttgaagaagtggcgcatctgctgatccacggcaaactgccgacccgtgacgaactcgccgcttacaaaacgaaactgaaagccctgcgcggtttaccggctaacgtgcgtaccgtgctggaagccttaccggcggcgagccacccgatggatgttatgcgcaccggtgtttccgcgctcggctgcacgctgccagaaaaagaggggcataccgtctctggcgcgcgggatattgccgacaaactgctggcgagccttagcagcattctcctttattggtatcactacagccacaacggcgaacgcatccaaccggaaaccgatgacgactccatcggcggtcacttcctgcatctgctgcacggcgaaaagccaagccaaagctgggaaaaggcgatgcatatcagcctggtgctgtacgccgaacacgagtttaacgcctccacctttaccagtcgggtgattgcgggcaccggctctgatatgtattccgcgattattggcgcgattggcgcactgcgcgggccaaaacacggcggggcgaatgaagtgagcctggagatccagcaacgctacgaaacgccggacgaagccgaagcagatatccgcaagcgcgtggaaaacaaagaagtggtcattggttttggtcatccggtttacaccatcgctgacccgcgccaccaggtgattaaacgtgtggcgaagcagctcagccaggaaggcggcagcctgaagatgtacaacatcgccgatcgcctggaaacggtgatgtgggagagcaaaaagatgttccccaatctcgactggttctctgctgtttcctacaacatgatgggcgttcccaccgagatgttcacaccactgtttgttatcgcccgcgtcaccggctgggcggcgcacattatcgaacaacgtcaggacaacaaaattatccgtccttccgccaattatgttggaccggaagaccgcccgtttgtcgcgctggataagcgccagtaaacctctacgaataacaataaggaaacgtacccaatgagtgctcaaatcaacaacatccgcccggaatttgatcgtgaaatcgttgatatcgtcgattacgtcatgaactacgaaatcagctctaaagtggcctacgacaccgcacattactgcctgctcgacacgctcggctgcggtctggaagctctcgaatacccggcctgtaaaaaactgctggggccaattgttcccggcaccgtcgtacccaacggcgtgcgcgtccccggaactcagttccagctcgaccccgtccaggcggcatttaacatcggcgcgatgatccgctggctcgatttcaacgatacctggctggcggcggagtggggccatccttccgacaacctcggcggcattctggcaacggcggactggcttagccgcaacgcggtcgccagcggcaaagcgccgttgaccatgaaacaggtgctgaccgcaatgatcaaagcccatgaaattcagggctgcatcgcgctggaaaactcctttaaccgcgtcggcctcgaccacgttctgttagtgaaagtggcttccaccgccgtggtcgccgaaatgctcggcctgacccgcgaggaaattctcaacgccgttagcctggcgtgggtggacggtcagagcctgcgcacctatcgccatgcgccgaacaccggcacgcgtaaatcctgggcggcgggcgatgccacttcccgcgcggtacgtctggcactgatggcgaaaacgggcgaaatgggttacccgagtgccctgactgcgccggtgtggggcttctacgacgtctcctttaaaggtgaaagcttccgcttccagcgcccgtacggttcctacgttatggaaaatgtgctgttcaaaatctccttcccggcggagttccactcccagacggcagttgaagcagcgatgacgctctatgaacagatgcaggcagcaggcaaaacggcggcggatatcgaaaaagtgaccattcgcacccacgaagcctgtattcgcatcatcgacaaaaaagggccgctcaataacccggcagaccgcgatcactgcattcagtacatggtggcgatcccgctgctattcgggcgcttaacggcggcagattacgaggacaacgttgcgcaagataaacgcattgacgccctgcgcgagaagatcaattgctttgaagatccggcatttaccgctgactaccacgacccggaaaaacgcgccatcgccaatgccattacccttgagttcaccgacggcacacgatttgaagaagtggtggtggagtaccccattggtcatgctcgccgccgtcaggatggtattccgaaactggtcgataaattcaaaatcaatctcgcgcgccagttcccgactcgccaacagcagcgcattctggaggtttctctcgacagagctcgcctggaacagatgccggtcaatgagtatctcgacctgtacgtcatttaagtaaacggcggtaaggcgtaagttcaacaggagagcattatgtcttttagcgaattttatcagcgtagcattaacgaaccggagcagttctgggccgagcaggcccggcgtattgactggcagacgccctttacgcaaacgctcgatcacagcaatccgccgtttgcccgttggttttgtgaaggccgaaccaacttgtgccacaacgccatcgaccgctggctggagaaacagccagaggcgctggcgctgattgccgtctctagcgaaacagaagaagagcgcacctttacctttcgtcagctgcatgacgaagtgaacgcggtggccagtatgttgcgtagtttgggtgtgcagcgcggcgatcgggtgctggtgtatatgccgatgattgccgaagcgcatattactctgctggcctgcgcgcgcattggcgctattcacagcgtggtgtttggtggatttgccagccacagcgtggcggcgcgaattgatgacgctaaaccggtgctgattgtcagcgctgatgccggagcgcgcggtggcaaaatcattccctataaaaaattgctcgacgatgcgataagtcaggcgcagcaccagccacgccatgttttgctggtggatcgcgggctggcgaaaatggcgcgcgtcagcgggcgggatgtcgatttcgcgagcttgcgccatcaacacatcggcgcgcgggtaccggtggcgtggctggaatccaacgaaacctcctgcattctctacacttccggcacgaccggcaaacctaaaggcgtgcagcgtgacgtcggcggatatgcggtggcgctggcgaccagcatggacaccatttttggcggcaaagcgggcagcgtgttcttttgcgcaagcgatatcggctgggtggtggggcatagctatatcgtttacgcgccgctgctggcggggatggcgactatcgtttacgaaggattgccgacctggccggactgcggcgtgtggtggacaatcgtcgagaaatatcaggttagccggatgttcagtgcgccgaccgccattcgcgtgctgaaaaaattccctaccgctgaaattcgcaaacacgatctcagcagcctggaagtgctctatctggctggagaaccgctggacgagccgaccgccagttgggtgagcaatacgctggatgtgccggtcatcgacaactactggcagaccgaatccggctggccgattatggcgattgctcgcggtctggacgacaggccgacgcgtctgggaagccccggtgtgccgatgtatggctataacgtgcagttgcttaatgaagtcaccggcgaaccgtgtggcgtcaacgagaaagggatgctggtggtggaagggccgctgccgccggggtgtattcagaccatctggggcgacgacggccgctttgtgaagacttactggagcctgttttcccgcccggtgtacgccacctttgactggggcatccgtgacgctgacggttatcactttattctcgggcgcactgacgatgtaattaacgttgccgggcatcggctggggacgcgcgagattgaagagagtatctccagccatccgggcgttgccgaagtggcggtggttggggtgaaagatgcgctgaaagggcaggtggcggtggcgtttgtcattccgaaagagagcgacagtctggaagatcgtgatgtggcgcacagccaagagaaggcgattatggcgctggtggacagccagattggcaactttggccgcccggcgcacgtctggtttgtcagccaattgccaaaaacgcgatccggaaaaatgctgcgccgcacgatccaggcgatttgcgaaggacgcgatcctggagatctgacgaccattgatgatcctgcgagcttggatcagatccgccaggcgatggaagagtaagttattgtcggatgcgtcgcgcggtgcatccggcactgtgtgccgatgcctgatgcgacgctgacgcgttttatcatgcctacggacctgaaccgtaggtcggataaggcgctcgcgtcgcatccgacaccatgctcagatgcctgatgcgacgctgacgcgtcttatcaggcctacccactgtttttacaccgataatttttcccccacctttttgcactcattcatataaaaaatatatttccccacgaaaacgattgctttttatcttcagatgaatagaatgcggcggattttttgggtttcaaacagcaaaaagggggaatttcgtgagccaagataacaactttagccaggggccagtcccgcagagcgcgcggaaaggggtattggcattgacgttcgtcatgctgggattaaccttcttttccgccagtatgtggaccggcggcactctcggaaccggtcttagctatcatgatttcttcctcgcagttctcatcggtaatcttctcctcggtatttacactagttttctcggttacattggcgcaaaaaccggcctgaccactcatcttcttgctcgcttcagctttggtgttaaaggcagttggctgcctagtctgctactgggcggaactcaggttggctggtttggcgtcggtgtggcgatgtttgccattccggtgggtaaggcaaccgggctggatattaatttgctgattgccgtttccggtttactgatgaccgtcaccgtcttttttggcattagcgcgctgacggttcttagcgtgattgcggttccggctatcgcctgcctgggcggttattccgtgtggctggctgttaacggcatgggcggcctggacgcattaaaagcggtcgttcccgcacaaccgttagatttcaatgtcgcgctggcgctggttgtggggagttttatcagtgcgggtacgctcaccgctgactttgtccggtttggtcgcaatgccaaactggcggtgctggtggcgatggtggcctttttcctcggcaacagcttgatgtttattttcggtgcagcgggcgctgcggcactgggcatggcggatatctctgatgtgatgattgctcagggcctgctgctgcctgcgattgtggtgctggggctgaatatctggaccaccaacgataacgcactctatgcgagcggtttaggtttcgccaacattaccgggatgagcagcaaaacccttagcgtaatcaacggtattatcggtacggtctgcgcattatggctgtataacaattttgtcggctggttgaccttccttagcgcagctattcctccagtgggtggcgtgatcatcgccgactatctgatgaaccgtcgccgctatgagcactttgcgaccacgcgtatgatgagtgtcaattgggtggcgattctggcggtcgccttggggattgctgcaggccactggttaccgggaattgttccggtcaacgcggtattaggtggcgcgctgagctatctgatccttaacccgattttgaatcgtaaaacgacagcagcaatgacgcatgtggaggctaacagtgtcgaataactaagacgcatgtggaggctaacagtgagcaataacgctttacaaacaattattaacgcccggttaccaggcgaagaggggctgtggcagattcatctgcaggacggaaaaatcagcgccattgatgcgcaatccggcgtgatgcccataactgaaaacagcctggatgccgaacaaggtttagttataccgccgtttgtggagccacatattcacctggacaccacgcaaaccgccggacaaccgaactggaatcagtccggcacgctgtttgaaggcattgaacgctgggccgagcgcaaagcgttattaacccatgacgatgtgaaacaacgcgcatggcaaacgctgaaatggcagattgccaacggcattcagcatgtgcgtacccatgtcgatgttagcgatgcaacgctaactgcgctgaaagcaatgctggaagtgaagcaggaagtcgcgccgtggattgatctgcaaatcgtcgccttccctcaggaagggattttgagctatcccaacggtgaagcgttgctggaagaggcgttacgcttaggggcagatgtagtgggggcgattccgcattttgaatttacccgtgaatacggcgtggagagcctgcataaaaccttcgccctggcgcaaaaatacgaccgtctcatcgacgttcactgtgatgagatcgatgacgagcagagccgctttgtcgaaaccgttgctgccctggcgcaccatgaaggcatgggcgcgcgagtcaccgccagccacaccacggcaatgcactcctataacggggcgtataccagtcgcctgttccgcttgctgaaaatgtccggtattaactttgtcgccaacccgctggtcaatattcatctgcaaggacgtttcgatacgtatccaaaacgtcgcggcatcacgcgcgttaaagagatgctggagtccggcattaacgtctgctttggtcacgatgatgtcttcgatccgtggtatccgctgggaacggcgaatatgctgcaagtgctgcatatggggctgcatgtttgccagttgatgggctacgggcagattaacgatggcctgaatttaatcacccaccacagcgcaaggacgttgaatttgcaggattacggcattgccgccggaaacagcgccaacctgattatcctgccggctgaaaatgggtttgatgcgctgcgccgtcaggttccggtacgttatagcgtacgtggcggcaaggtgattgccagcacacaaccggcacaaaccaccgtatatctggagcagccagaagccatcgattacaaacgttgaacgactgggttacagcgagcttagtttatgccggatgcggcgtgaacgccttatccggcctacgtagagcactgaactcgtaggcctgataagcgtagcgcatcaggcaattccagccgctgatctgtgtcagcggctaccgtgattcattcccgccaacaaccgcgcattcctccaacgccatgtgcaaaaatgccttcgcagcggctgtctgccagctgtagtttatgccggatgcggcgtgaacgccttatccggcctacgtagagcactgaactcgtaggcctgataagcgtagcgcatcaggcaattccagccgcagacctgtgtcagcggttaccgactttcatttccgccaacaaccgcgcatttatccaacgccatgtgcaaaaatgccttcgcggcggctgtctgccagctatttttccgccgcaacaaaaccgccgttctctccagtagtggcggggcaagagaaatagctttaagcccgtcatgttgtgtggcaatcgctgctggtaacaatgtggaaagggaagtgcggcgaatcagctccagaaccgcgctaatactgttcgcctcaatgaccacctgtggatgtagccccgctttctcgcagtagtggtcaatttgctctctggtggcaaattccgcgctgagcaggaccagtttttcatcatgcaagcgactcaacgccacctgttcatggacggccagcggatgatgttgcgccacgactaacgctaaactttctgtcagtaaaggaattgcctccagctccgggctatgcacaggcgcgaaggcaatcccaacgtccaactcgtcgcggcaaagcatatcctcgattttctcctggctcatttcctgtagctggagcgtgatgctgggatagcgcgcatagaaatccgccattaaggggccgataaagtagctcgtaaaggtgggggtgacggcgatacgcaggcttcctcgcgtcagatcggcaacatcatgaatcgcccgtttacccgcccccagttcctgtaacgcccggctggcgtactgtcgccagacttctcctgcatcagtgagacgaatcgttcgcccgctacggtcaaacagcggcacgcctaaactctcctctaactggcgaatctgctgggaaagcgcaggttgggagacgtgcaacgcactggcggcacgggtgaagctgccatgttcagccacggcaagaaaataattgatatgtcgagagagcattcgcaacctataagtaaatccaatggaactcatcataaatgagacttttaccttatgacaatcggcgagtagtctgcctctcattccagagacagacagaggttaacggtgaaagagattattgatggattccttaaattccagcgcgaggcatttccgaagcgggaagccttgtttaaacagctggcgacacagcaaagcccgcgcacactttttatctcctgctccgacagccgtctggtccctgagctggtgacgcaacgtgagcctggcgatctgttcgttattcgcaacgcgggcaatatcgtcccttcctacgggccggaacccggtggcgtttctgctagcgtggagtatgccgtcgctgcgcttcgggtatctgacattgtgatttgtggtcattccaactgtggcgcgatgaccgccattgccagctgtcagtgcatggaccatatgcctgccgtctcccactggctgcgttatgccgatagtgcccgcgtcgttaatgaggcgcgcccgcattccgatttaccgagtaaagctgcggcgatggtacgtgaaaacgtcattgctcagttggctaatttgcaaactcatccaagcgtgcgcctggcgctcgaagaggggcggatcgccctgcacggctgggtctacgacattgaaagcggcagcatcgcagcttttgacggcgcaacccgccagtttgtgccactggccgctaatcctcgcgtttgtgccataccgctacgccaaccgaccgcagcgtaaccttatttttaaaccatcaggagttccaccatgattcagagtcaaattaaccgcaatattcgtcttgatcttgccgatgccattttgctcagcaaagctaaaaaagatctcagttttgccgagattgccgacggcaccggtctggcagaagcctttgtaaccgcggctttgctgggtcagcaggcgcttcctgccgacgccgcccgcctggtcggggcgaagctggatctcgacgaagactccattctactgttgcagatgattccactgcgtggctgcattgatgaccgtattccaactgacccaacgatgtatcgtttctatgaaatgttgcaggtgtacggtacaaccctgaaagcgttggttcatgagaaatttggcgatggcattattagcgcgattaacttcaaactcgacgttaagaaagtggcggacccggaaggtggcgaacgtgcggtcatcaccttagatggtaaacatctgccgaccaaaccgttctgacagccatgcgcaaccatcaaaagacgttcacgatgctgctggtactggtgctgattggtcttaatatgcgaccactgctcacctccgtcgggccactgctaccgcaattgcgccaggcgagcggaatgagctttagcgtggctgccctgttgaccgctctgccggtggttaccatgggcgggctggcgctggccggaagctggcttcatcagcatgtcagcgaacgtcgcagtgtcgccatcagtctgttgctgattgccgtcggtgcattgatgcgtgagctttacccgcaaagtgcgctgctgcttagcagcgcactgcttggtggggtggggatcggcatcattcaggcggtgatgcctagcgtgattaaacggcggtttcagcagcgcacgccactggtgatggggctgtggtccgcggctctgatgggcggcggtgggcttggtgccgccataacgccctggttagttcaacatagcgaaacctggtatcaaacactcgcctggtgggcgctgcctgccgttgttgcgctctttgcctggtggtggcaaagcgcccgcgaggtcgcctcttcccacaagacaacaaccactccggttcgcgtggtattcactccccgcgcgtggacgctgggtgtttacttcggtctgattaacggcggttacgccagcctgattgcctggttacccgctttctatattgagattggtgccagcgcgcagtacagcggttccttactggcattgatgacgcttgggcaagccgcaggagctttgctgatgcctgctatggctcgccatcaggatcggcgcaaactgttaatgctggcgctggtgttacaactggtggggttctgcggctttatctggctgccgatgcaattgccggtattgtgggcgatggtgtgtgggttaggtctgggcggcgcgtttccgctctgtttgctgctggcgctcgatcactctgtgcaaccggctattgctggcaagctggtggcgtttatgcagggaatcggttttatcatcgccgggcttgccccgtggttttctggcgtgctgcgtagtatcagcggcaattacctgatggactgggcatttcatgcgctgtgcgtcgttgggctgatgatcataaccctgcgttttgcaccagtacgttttccgcagctgtgggtcaaagaggcatgatgcgacgcttgttcctgcgctttgttcatgccggatgcggctaatgtagatcgctgaacttgtaggcctgataagcgcagcgtatcaggcaatttttataatttaaacactgctttcaactttataatctttgaaataatagtgcttatcccggtcgtttatttcgcgaataacccgacaaggaacgccagccgccacgacgtttggtggaatgtcttttgtgacgatactacccgcgccaataacagaattatccccgatggtgacgcctggattaataaccacatgacttccgatccagacgttattgccaatcgttatcggaaaagagtacatctcgccgttttttctcaattcatggtgtacagggtgtcccgtaacggaaagagtaacgttgggtgcaatcagtacgttatcaccgattgttaccgtgtagtcatcgacaatggttaaattgaaatttgcataaaaattgcggcctatatggatgttggaaccgtaagagaaatagacaggcggttctacccaggcgttttcccctaccgtggcaaacatttctttaatcaggctttctcttttttcaacttcacttggatggctgtgattaaactcatacattaacgttttcccacgaagtcttttttccggtaagccttcgcacatatcggtaaatagcttgcctgctcttattctttcggtcattggcatgttcaatgcgatcactccgttatgatatgttggtcggataaggcgctcgcgccgcatccgacattgattgcttaagcgacttcattcacctgacgacgcagcagggaaagcgggccggggccgctaagcgtgaacacggaaattaaggtgaagcccagcgccaccagacccagcaccagataagcgccctggaaaccgatgctttcatacatattgcccgccagtacagacataaaaatcatcgccagttgcttaaagaagcagaaacagaccagataaatcgtcgcactaaaacgcacttcaaactggctggtaatatatttaaagcagcccaccagcaggaacggtacttcaaacatatgcagcgttttcagaataaccacttccagcgcactggtggcgaagctactgccaataatacgtacagacataatagtgccagccagcagcagggcgtttttcccaccgatgcgattaatgatcagtggcgcaaagaacataatgctggcgttaagtaattcgcccattgtcgttacgtagccaaatacccgcgtaccctgttcaccggtagcaaagaagctagtaaagaaattagcaaactgttggtcaaaaacatcgtaggtgcaggaaacgccaataacatacagactcaaaaaccacagttttggctgtctgaacagttccagtgccagcttaaggctaaatgcgctatggttggcacctaccgcattggcaaccgtggcagaagagggcgcatccgttttggcgaaaaagagtaaaacggcgaggatgagtgcacagccagagcccagccagaaaacaaactgattattgatggtgaacatgatgccgacaatgctggcacacagcgcccagccaacacagccaaacatccgcgcgcgaccaaattcgaaattactgcgacggctgactttctcaataaatgcctctactgctggcgcaccggcgttaaaacaaaagcctagataaataccaccaacaatgcttcctactaaaatgttgtattgtaacagtggcccgaagataaaaataaagaacggcgcaaacatcactaacatgccggtaataatccacagcaggtatttgcgcagcccgagtttgtcagaaagcagaccaaacagcggttggaataataggctgaacagagaaatagcggcaaaaataatacccgtatcacttttgctgatatggttgatgtcatgtagccaaatcgggaaaaacgggaagtaggctcccatgataaaaaagtaaaagaaaaagaataaaccgaacatccaaaagtttgtgttttttaaatagtacataatggatttccttacgcgaaatacgggcagacatggcctgcccggttattattatttttgacaccagaccaactggtaatggtagcgaccggcgctcagctggaattccgcgcttacactcgggctccaggagtcgtcgccaccaatccccatatggaaaccgtcgatattcagccatgtgccttcttccgcgtgcagcagatggcgatggctggtttccatcagttgctgttgactgtagcggctgatgttgaactggaagtcgccgcgccactggtgtgggccataattcaattcgcgcgtcccgcagcgcagaccgttttcgctcgggaagacgtacggggtatacatgtcactcaatggcagatcccagcggtcaaaacaggcggcagtaaggcggtcgggatagttttcttgcggccctaatccgagccagtttacccgctctgctacctgcgccagctggcagttcaggccaatccgcgccggatgcggtgtatcgctcgccacttcaacatcaacggtaatcgccatttgaccactaccatcaatccggtaggttttccggctgataaataaggttttcccctgatgctgccacgcgtgagcggtcgtaatcagcaccgcatcagcaagtgtatctgccgtgcactgcaacaacgctgcttcggcctggtaatggcccgccgccttccagcgttcgacccaggcgttagggtcaatgcgggtcgcttcacttacgccaatgtcgttatccagcggtgcacgggtgaactgatcgcgcagcggcgtcagcagttgttttttatcgccaatccacatctgactaagaaagccactctggcggttaaattgccaacgcttattacccagctcgatgcaaaaatccatttcgctggtggtcagatgcgggatggcgtgggacgcggcggggagcgtcacactgaggttttccgccagacgccactgctgccaggcgctgatgtgcccggcttcactccatgcggtcgcgttcggttgcactacgcgtactgtgagccagagttgcccggcgctctccggctgcggtagttcaggcagttcaatcaactgtttaccttgtggagcgacatccagaggcacttcaccgcttgccagcggcttaccatccagcgccaccatccagtgcaggagctcgttatcgctatgacggaacaggtattcgctggtcacttcgatggtttgcccggataaacggaactggaaaaactgctgctggtgttttgcttccgtcagcgctggatgcggcgtgcggtcggcaaagaccagaccgttcatacagaactggcgatcgttcggcgtatcgccaaaatcaccgccgtaagcgctccacgggttgccgttttcatcatatttaatcaggctctgatccacccagtcccagacgaagccgccctgtaaacggggatactgacgaaacgcctgccagtatttagcgaaaccgccaagactgttacccatcgcgtgggcgtattcgcaaaggatcagcgggcgcgtctctccaggtaggctaagccattttttgatggaccatttcggcacagccgggaagggctggtcttcatccacgcgcgcgtacatcgggcaaataatatcggtggccgtggtgtcggctccgccgccttcatactgcaccgggcgggaaggatcgacagatttgatccagcgatacagcgcgtcgtgattagcgccgtggccactttcattccccaggctccagatgatcacactcgggtgattacgatcgcgctgcaccattcgcgttacgcgttcgctcatcgccggtagccagcgcggatcatcggtcagacgattcattggcaccatgccgtgggtttcaatattggcttcatccaccacatacaggccgtagcggtcgcacagcgtgtaccacagcggatggttcggataatggctacagcgcacggcgttaaagttgttctgcttcatcagcaggatatcctgcaccatcgtctgctcatccatgacctgaccatgcagaggatgatgctcgtgacggttaacgcctcgaatcagcaacggcttgccgttcagcagcagcagaccattttcaatccgcacctcgcggaaaccgacatcgcaggcttctgcttcaatcagcgtgccgtcggcggtgtgcagttcaaccaccgcacgatagagattcgggatttcggcgctccacagtttcgggttttcgacgttcagacgtagtgtgacgcgatcggcataaccaccacgctcatcgataatttcaccgccgaaaggcgcggtgccgctggcgacctgcgtttcaccctgccataaagaaactgttacccgtaggtagtcacgcaactcgccgcacatctgaacttcagcctccagtacagcgcggctgaaatcatcattaaagcgagtggcaacatggaaatcgctgatttgtgtagtcggtttatgcagcaagctgacgtcacggaaaatgccgctcatccgccacatatcctgatcttccagataactgccgtcactccagcgcagcaccatcaccgcgaggcggttttctccggcgcgtaaaaatgcgctcaggtcaaattcagacggcaaacgactgtcctggccgtaaccgacccagcgcccgttgcaccacagatgaaacgcgctgttaacgccatcaaaaataattcgcgtctggccttcctgtagccagctttcatcaacattaaatgtgaggctgtaacaacccgtcggattctccgtgggaacaaacggcggattgaccgtaatgggataggtcacgttggtgtagatgggcgcatcgtaaccgtgcatctgccagttactggggacgacgacagtatcggcctcaggaagatcgcactccagccagctttccggcaccgcttctggtgccggaaaccaggcaaagcgccattcgccattcaggctgcgcaactgttgggaagggcgatcggtgcgggcctcttcgctattacgccagctggcgaaagggggatgtgctgcaaggcgattaagttgggtaacgccagggttttcccagtcacgacgttgtaaaacgacggccagactatccgtaatcatggtcatagctgtttcctgtgtgaaattgttatccgctcacaattccacacaacatacgagccggaagcataaagtgtaaagcctggggtgcctaatgagtgagctaactcacattaattgcgttgcgctcactgcccgctttccagtcgggaaacctgtcgtgccagctgcattaaactatcggccaacgcgcggggagaggcggtttgcgtattgggcgccagggtggtttttcttttcaccagactgacgggcaacagctgattgcccttcaccgcctggccctgagagagttgcagcaagcggtccacgctggtttgccccagcaggcgaaaatcctgtttgatggtggttaacggcgggatataacaactgctgtcttcggtatcgtcgtatcccactacgctgatatccgcaccaacgcgcagcccggactcggtaatggcgcgcattgcgcccagcgccatctgatcgttggcaaccagcatcgcagtgggaacgatgccctcattcagcatttgcatggtttgttgaaaaccggacatggcactccagtcgccttcccgttccgctatcggctgaatttgattgcgagtgagatatttatgccagccagccagacgcagacgcgcgctgacagaacttaatgggcccgctaacagcgcgatttgctggtgacccaatgcgaccagatgctccacgcccagtcgcgtaccgtcttcatgggagaaaataatactgttgatgggtgtctggtcagagacatcaagaaataacgccggaacattagtgcaggcagcttccacagcaatggcatcctggtcatccagcggatagttaatgatcagcccactgacgcgttgcgcgagaagattgtgcaccgccgctttacaggcttcgacgccgcttcgttctaccatgctcaccaccacgctggcacccagttgatcggcgcgagatttaatcgccgcgacaatttggctcggcgcgtgcagggccagactggaggtggcaacgccaatcagcaagctctgtttgcccgccagttgttgtgccacgcggttgggaatgtaattcagctccgccatcgccgcttccactttttcccgcgttttcgcagaaacgtggctggcctggttcaccacgcgggaaacggtctgataagagacaccggcatactctgcgacatcgtataacgttactggtttcacattcaccaccctgaattgactctcttccgggcgctatcatgccataccgcgaaaggttttgcgccattcgatggtgtcaacgtaaatgcatgccgcttcgccttccggccaccagaatagcctggctttcaaccccttcttcgatctgttttgctacccgttgtagcgccggaagatgcttttccgctgcctgttcaatggtcattgcgctcgccatatacaccagattcagacagccaatcacccgttgttcactgcgcagcggtacggcgatagaggcgatcttctcctcctgatcccagccgcggtagttctgtccgtaaccctctttgcgcgcgcgcgccagaatggcttccagctttaacggttcccgtgccagttgatagtcatcaccggggcgggaggctaacatttcgattaattccttgcggtcttgttccgggcaaaaggccagccaggtcaggccgctggcggttttcagaagcggcaaacgtcgcccgaccattgcccggtgaaaggataagcggctgaaacggtgagtggtttcgcgtaccaccattgcatcaacatccagcgtggacacatctgtcggccataccacttcgcgcaacagatcgcccagcagtggggccgccagtgcagaaatccactgttcgtcacgaaatccttcgcttaattgccgcactttgatggtcagtcgaaaactatcatcggaggggctacggcggacatatccctcttcctgcagcgtctccagcagtcgccgcacagtggtgcgatgcaggccgctgagttccgccagcagcccgacgctggcaccgccatcaagtttatttaacatatttaataacattagaccgcgggttaagccgcgcacggttttgtattccgtctgctcattgttctgcatattaatactcatttctatagttaaaacaacgtggtgcacctggtgcacattcgggcatgttttgattgtagcgctaaacacccttcctatactgagcgcacaataaaaaatcatttacatgtttttaacaaaataagttgcgctgtactgtgcgcgcaacgacattttgtccgagtcgtgaggtactgaaatggcaatacaacaccctgacatccagcctgctgttaaccatagcgttcaggtggcgatcgctggtgccggcccggttgggctgatgatggcgaactatctcggccagatgggcattgacgtgctggtggtggagaaactcgataagttgatcgactacccgcgtgcgattggtattgatgacgaggcgctgcgcaccatgcagagcgtcggcctggtcgatgatgttctgccgcacactacgccgtggcacgcgatgcgttttctcaccccgaaaggccgctgttttgctgatattcagccaatgaccgatgaatttggctggccgcgccgtaacgcctttattcagccgcaggtcgatgcggtgatgctggaaggggtgagccgttttccgaatgtgcgctgcttgttttcccgcgagctggaggccttcagtcagcaagatgacgaagtgaccttgcacctgaaaacggcagaagggcagcgggaaatagtcaaagcccagtggctggtagcctgtgacggtggagcaagttttgtccgtcgcactctgaatgtgccgtttgaaggtaaaactgcgccaaatcagtggattgtggtagatatcgccaacgatccgttaagtacgccgcatatctatttgtgttgcgatccggtgcgcccgtatgtttctgccgcgctgcctcatgcggtacgtcgctttgaatttatggtgatgccgggagaaaccgaagagcagctgcgtgagccgcaaaatatgcgcaagctgttaagcaaagtgctgcctaatccggacaatgttgaattgattcgccagcgtgtctacacccacaacgcgcgactggcgcaacgtttccgtattgatcgcgtactgctggcgggcgatgccgcgcacatcatgccggtatggcaggggcagggctataacagtggtatgcgcgacgcctttaacctcgcatggaaactggcgttggttatccaggggaaagcccgcgatgcgctgctcgatacctatcaacaagaacgtcgcgatcacgccaaagcgatgattgacctgtccgtgacggcgggcaacgtgctggctccgccgaaacgctggcagggtacgttacgtgacggcgtttcctggctgttgaattatctgccgccagtaaaacgctacttcctcgaaatgcgcttcaagccgatgccgcaatattacggcggtgcgctgatgcgtgagggcgaagcgaagcactctccggtcggcaagatgtttattcagccgaaagtcacgctggaaaacggcgacgtgacgctgctcgataacgcgatcggcgcgaacttcgcggtaattggctggggatgcaatccactgtgggggatgagcgacgagcaaatccagcagtggcgcgcgttgggcacacgcttcattcaggtggtgccggaagtgcaaattcataccgcacaggataaccacgacggcgtactacgcgtgggcgatacgcaaggtcgcctgcgtagctggttcgcgcaacacaatgctagcctggtggtgatgcgcccggatcgctttgttgccgccaccgccattccgcaaaccctgggcaagaccctgaataaactggcgagcgtgatgacgctgacccgccctgatgccgacgtttctgtcgaaaaggtagcctgatatgcacgcttatcttcactgtctttcccacagcccgctggtggggtatgtcgacccggcgcaagaggtgctcgatgaggtcaatggcgtgattgccagcgcccgcgagcgtattgcggcattctcccctgaactggtggtgctgtttgcgccagatcactacaacggctttttctatgacgtgatgccaccgttctgtttaggcgttggagcgacggcaattggtgatttcggcagtgcggcaggagagctgcccgtgcctgtggagctggcggaggcctgtgcgcatgccgtcatgaagagcgggatcgatcttgccgtttcttactgtatgcaggtggaccacgggttcgcccagccgctggagttcctgctcggtgggctggataaggtgccagttctgcctgtgttcatcaacggtgtcgccacgccgctgcccggtttccagcgtacccgcatgttgggtgaagccattggacgtttcaccagcactctcaataaacgcgtgctgttcctgggttccggtgggctttcccatcagccgccggtgcccgaactggcgaaagccgatgcccatatgcgcgaccgtctgttggggagcgggaaagatttacccgccagtgagcgcgaattgcgtcagcaacgggtgattagcgccgctgagaagtttgttgaggatcagagaacgctgcatccgctcaacccgatttgggataaccagttcatgactttgctggagcagggacgcatacaggaactggatgccgtcagtaacgaagagctttccgccattgccggaaagagcacacatgaaatcaaaacctgggtcgccgcttttgccgctatttctgcgtttggcaactggcgtagcgaagggcgttattaccgcccaatcccggagtggattgccggatttggcagcttaagcgccagaacagagaactgaatatgcaggagaagatgatgagttatcagccacaaaccgaagccgccaccagccgttttctgaatgtagaagaagcgggtaaaacgctgcgcatccattttaatgactgcggacaaggcgacgaaaccgttgtcctgctgcatggttccggcccgggtgctactggctgggcgaacttcagccgcaatatcgatccgctggtagaggcgggctatcgggtgatcctgctggattgtccgggttggggcaagagcgatagcgtcgttaatagtggtagccgaagcgatcttaatgcacgaatcctgaaaagcgtggtggatcaactggatatcgccaaaatccacctgctgggcaacagcatggggggccatagttctgtggcgttcacccttaaatggccggagcgcgtcggcaaactggtgctgatgggcggcggtacgggcggcatgagtttgtttacgccgatgccaaccgaaggtattaagcgactgaatcagctttatcgtcagccgactatcgaaaacctgaagctgatgatggatatcttcgtttttgataccagcgatttgaccgacgccctgtttgaagcgcgcctgaataatatgctgagccgccgcgatcacctggaaaacttcgttaagagcctggaagctaatccgaaacagttcccggattttggcccacgtctggcggaaatcaaagcgcaaaccctgattgtctgggggcgcaacgaccgctttgtgccgatggatgcgggtctgcgtctgctgtccggcattgccggttctgaactgcatatcttccgcgactgtggtcactgggcgcagtgggaacatgccgacgctttcaatcaactggtgctgaatttcctcgcacgcccttaaggaatggtcatgacgaagcatactcttgagcaactggcggcggatttacgccgcgccgcagagcagggcgaagcgattgcaccgctgcgcgatctgattggtatcgataacgctgaagcggcttacgccattcagcacataaatgtgcaacatgacgttgcgcaggggcgtcgcgtggtagggcgtaaagtgggcctgacacatccgaaagtgcaacaacaactgggcgttgatcaaccggattttgggacgttatttgccgacatgtgttatggcgataacgaaatcattcctttttcccgtgttctgcaaccccgcattgaagcggagatcgcactggtgttgaaccgcgatttgcccgcaaccgatatcaccttcgacgaattgtataacgccattgaatgggtacttccggcgctggaagtggtggggagccgcattcgcgactggagcattcagtttgtcgataccgtggcagataacgcctcctgtggggtgtatgtcatcggcggtccggcgcaacgtccggcggggttagacctgaaaaactgcgccatgaagatgacgcgtaataacgaagaggtttctagcgggcgcggcagcgaatgcctgggacatccgcttaatgcggccgtctggctggcacgcaaaatggccagtctgggtgaaccgctgcgcaccggagatatcattcttaccggggcattaggtccgatggtggcggtgaatgcgggcgatcgttttgaagcccatattgaaggcataggtagtgttgctgcgacatttagtagcgcagccccaaaaggaagtctgagttgagctaagccccaaaaggaagtctgtcatgagtaagcgtaaagtcgccattatcggttctggcaacattggtaccgatctgatgattaaaattttgcgtcacggtcagcatctggagatggcggtgatggttggcattgatcctcagtccgacggtctggcgcgcgccagacgtatgggcgtcgccaccacccatgaaggggtgatcggactgatgaacatgcctgaatttgctgatatcgacattgtatttgatgcgaccagcgccggtgctcatgtgaaaaacgatgccgctttacgcgaagcgaaaccggatattcgcttaattgacctgacgcctgctgccatcggcccttactgcgtgccggtggttaacctcgaggcgaacgtcgatcaactgaacgtcaacatggtcacctgcggcggccaggccaccattccaatggtggcggcagttagtcgcgtggcgcgtgttcattacgccgaaattatcgcttctatcgccagtaaatctgccggacctggcacgcgtgccaatatcgatgaatttacggaaaccacttcccgagccattgaagtggtgggcggcgcggcaaaagggaaggcgattattgtgcttaacccagcagagccaccgttgatgatgcgtgacacggtgtatgtattgagcgacgaagctagtcaagatgatatcgaagccagtatcaatgaaatggctgaggcggtgcaggcttacgtaccgggttatcgcctgaaacagcgcgtgcagtttgaagttatcccgcaggataaaccggtcaatttaccgggcgtggggcaattctccggactgaaaacagcggtctggctggaagtcgaaggcgcagcgcattatctgcctgcctatgcgggcaacctcgacattatgacttccagtgcgctggcgacagcggaaaaaatggcccagagtctggcgcgcaaggcaggagaagcggcatgaacggtaaaaaactttatatcagcgacgtcacattgcgtgacggtatgcacgccattcgtcatcagtatagcctggaaaacgttcgccagattgccaaagcactggacgatgcccgcgtggatagcattgaagtggcccacggcgacggtttgcaaggttccagctttaactatggtttcggcgcacatagcgaccttgaatggattgaagcggcggcggatgtggtgaagcacgccaaaatcgcgacgttgttgctgccaggaatcggcactattcacgatctgaaaaatgcctggcaggctggcgcgcgggtggttcgtgtggcaacgcactgtaccgaagctgatgtttccgcccagcatattcagtatgcccgcgagctcggaatggacaccgttggttttctgatgatgagccatatgaccacgccggagaatctcgccaagcaggcaaagctgatggaaggctacggtgcgacctgtatttatgtggtggattctggcggtgcgatgaacatgagcgatatccgtgaccgtttccgcgccctgaaagcagagctgaaaccagaaacgcaaactggcatgcacgctcaccataacctgagtcttggcgtggcgaactctatcgcggcggtggaagagggctgcgaccgaatcgacgccagcctcgcgggaatgggcgcgggcgcaggtaacgcaccgctggaagtgtttattgccgccgcggataaactgggctggcagcatgggaccgatctctatgcgttaatggatgccgccgacgacctggtgcgtccgttgcaggatcgaccggtacgagtcgatcgcgaaacgctggcgctgggatacgctggtgtttacagcagcttcctgcgtcactgtgaaacggcggcggcgcgttatggcttaagtgcggtggatattctcgttgagctgggcaaacgccggatggttggcggccaggaggatatgatcgttgacgtggcgctggatctgcgcaacaacaaataatgatgactgccgagaacgtgcattttgtatgcccatcccagcacgactgccggatgcggcgtgaacgccttatccggcctacggatggcgtgagaatttgtaggtctgataagacgcgttagcgtcgcatcaggcatctgcgcacgactgccggatgcggcgtgaacgccttatccggcctacggatggcgcgggaatttgtaggcctgataagacgcgttagcgtcgcatcaggcatctgcgcacgactgccggatgcggcgtgaacgccttatccggcctacgggtggcgcgagaatttgtaggcctgataagacgcgttagcgtcgcatcaggcatctgcgcacgactgccggatgcggcgtaaacgccttatccggcctacggatggcgcgggaatttgtaggcctgataagacgcgttagcgtcgcatcaggcatctgcacacgactgccggatgcgataaacgtcttgtccggcctacatttcgcccgtaggcagtcattaaatagttctgattacgcggctggcaatgtatcagtcgcgattcacctgcactcgcaacgaggttcatcttatgagcactcgtacccctagtagttctagttcccgcctgatgctgaccatcgggctttgttttttggtcgctctgatggaagggctggatcttcaggcggctggcattgcggcgggtggcatcgcccaggctttcgcactcgataaaatgcaaatgggctggatatttagcgccggaatactcggtttgctacccggcgcgttggttggcggaatgctggcggaccgttatggtcgcaagcgcattttgattggcagtgttgcgctgtttggtttgttcagtctggcaacggcgattgcctgggatttccccagtctggtctttgcgcggctgatgaccggtgtcgggctgggggcggcgttgccgaatcttatcgccctgacgtctgaagccgcgggtccacgttttcgtgggacggcagtgagcctgatgtattgcggtgttcccattggcgcggcgctggcggcgacactgggtttcgcgggggcaaacttagcatggcaaacggtgttttgggtaggtggtgtggtgccgttgattctggtgccgctattaatgcgctggctgccggagagcgcggttttcgctggcgaaaaacagtctgcgccaccactgcgtgccttatttgcgccagaaacggcaaccgcgacgctgctgctgtggttgtgttatttcttcactctgctggtggtctacatgttgatcaactggctaccgctacttttggtggagcaaggattccagccaagccaggcggcaggggtgatgtttgccctgcaaatgggggcggcaagcgggacgttaatgttgggcgcattgatggataagctgcgtccagtaaccatgagcctactgatttatagcggcatgttagctagcctgctggcgcttggaacggtgagcagttttaacggtatgttgctggcgggatttgtcgcggggttgtttgcgacaggtgggcaaagcgttttgtatgccctggcaccgttgttttacagtagccagatccgcgcaacaggtgtgggaacagccgtggcggtagggcgtctgggggctatgagcggtccgttactggccgggaaaatgctggcattaggcactggcacggtcggcgtaatggccgcttctgcaccgggtattcttgttgctgggttggcggtgtttattttgatgagccggagaagtcgaatacagccgtgcgccgatgcctgacgtgccttattaggcaggggcgaaagggacttcaccccaatacacctacggcgtttacaggtatactcgctaaaaattattcagcgggtttggaaacaaagatggcaaaacttaccttacaagagcagttgctcaaagcaggattagtcaccagcaaaaaagcggcgaaggtggagagaacggcgaaaaaaagccgcgttcaggcgcgtgaagctcgggcggcggtagaagaaaataaaaaggcacagcttgagcgtgataaacagcttagcgaacagcaaaaacaagcggcgttggcgaaagaatataaagctcaggtgaagcagcttattgaaatgaaccgaatcaccattgccaatggcgatattggttttaacttcactgacggcaatctgattaagaagatttttgtcgataagctcacacaggcgcagttgattaatggtcgtctggcgattgcccgcttgttggtcgataacaatagcgaaggtgaatacgccattattcccgccagcgttgccgataaaattgctcagcgcgatgccagcagtatagtgttgcacagcgcgctcagcgccgaagagcaggatgaagacgacccgtatgccgacttcaaagtgcctgatgatttgatgtggtaaacatagataagtcgtgcgcagatgcctgatgcgacgctatgcgcgtcttatcaggcctacggtttatgggcgaagtgtagaccggataaggcgttcacgccgcatccggcagtcgtgcgccatgcctgatgcgacgctttgcgcgtcttatcaggcctacggcttacgggcgaagtgtaggccggataaggcgttcacgccgcatccggcagtcgtgctattatcaacgcatattcagtttattggcgtggtaggcaatatgctcgccaataaaactggagacaaaataatagctgtgatcataaccctcgtgataacggattaacgtcttgatattcatctcctggcagatcttttcaagatttggagtccgcagctgttctgcgtaaaaatcatcactcaacccctgatcaaccatgatttccgcaacgcgttgaccttgactaataagactcaccgggtcgtaatccaaccaggcatctttattttcagcaagatatgcagcaaaggcttgctgtccccacggcacttggcttggggagacaatggggctaaacgcgctgacgctgacatattcatctgggttacgtaacgccagcaccagcgcgcccagcccgcccatagaatgaccagagatagactttttggccgttgccggaaaatgatgcatcactaaatccggcagctcgttgcggatatagtcatacattttgtaatgttcattccacggcgcttgcgtcgcgttcaggtaaaacccggcaccttgcccgagatcgtaacggtcagcatctgcgacatgactgcctcgcggactggtgtccggcgcaacaacaataatgttgtgctcagccgcgtaacgctgcatcccgcttttagtaatgaaattctgctcgttgcaggtcaggccactaagccagtacagcaccggcaatttttcattcgcggcttttggtgggagatagacgccgacattcatttcacatttcagactttgggaataatgccgatacatattttgccagccgccaaagctgacatgtttttcaatgagttccatcagtcattatctcagggttaatcccccggacggctgcccggggagagtattaagaacccccgcctgaagtggacggggtaaacctgcgggaaatcagtaacgaattacggttcgaatggatttgccttcatgcatcaggtcgaaggcgtcattaatttcatccaggctcatggtatgcgtgacaaacggttccagatcgatatcacctttcatcgcatcttcaaccatgcccggtaactgggaacgacctttcacgccgccaaacgcggaacctttccatacgcgaccagtgaccaactggaatggacgggtggagatttcctgaccggcaaccgcgaccccgatgatcacgctctgaccccagccgcggtgcgcactttccagcgccgcacgcatcacgttgacgttaccgatgcattcaaaggtatggtcgataccccatttgttgatatccaacaggacatcttttatcggtttgtcgtagtcattcgggttaatgcagtcggtagcaccgaagcgacgcgccagatcgaatttcttcgggttggtatcgatagcgataatccgacccgctttcgcctgacgcgcgccctgaaccactgccagaccaatcgcgccaagaccaaacacggcaacagaatcacctggctggactttagctgtgttgtgtaccgcgccaataccggtggtcacgccacagcccagcaggcagacgtgttcatggtttgcttctggattaatttttgccagagacacttccgcgactacggtgtattcactgaatgtagagcaccccatgtagtgataaagcggctgcccgttgtaagaaaaacgggtggtgccgtctggcatcaggcctttaccctgggtttcgcgaaccgcaacacagaggttagttttgccagaacgacagaactcacactcgccgcactccgcggtgtaaagcgggatcacatggtcgccaggtttgacgctggttacgccttcaccgacttcaaccacaacgccggccccttcgtgaccgagaaccaccgggaatacaccttccgggtcatcgccggagagggtaaatgcgtcggtatggcaaacgccggtatgggtgactttaattagcacttcaccttttttcggtggtgcaacgtcaatttcaacgatttccagcggtttaccgggagcaaatgcaacggcagcacgacttttcatctctcgctcttcctcaatatggtaatagattcagttatttaagataggcacgaaccagttcaatagtgtcgtcaacggattggctgacttcgcggctgtagcagtcatttcggtcaaacgtttcccggatatggctttcaagcacttctgccatcagcccattagccgcgccccgaacggcagcgatctgttggagtatggcacggcattcggcatcaccctccaggctccgttccagagcatcaatctgcccccgaatacgacgaactcgagtaaggacctttttcttctcttccggagtactgggcatttcgcacctcatcatctgcatgcaatatactataggggggtattctatatgtcaatgcatacccccctatagtatataacactggagaataaaatttatccggtgaatgtggtcggaaaacaaagaggaaaggggggggggctaatcggcagggaaggccgccccggatagcgggcggcagaaggaatcagaatttccaggtcagacgggctgcaagttgcagaccgttacgagatggacggtcccctcgcccccttggggagagggttagggtgagggggcgttcaccgtactttcaacaggttaactccccctttctgagaggaaacaaaattaacgcagaatcttcttctcagccaaatccagcgcaaagtagctgaaaatcagatccgcacccgcacgcttaatgctacctaagctttcgagcacgactttctcttcatctatagcacccgccagcgcggcgaacttaatcatcgcatactcaccgctcacctgatacgcgccaatcggcaattcagtacgttcacgcagctcacgcacgatgtcgaggtacgctccagcaggtttaaccatcaggcagtctgcgccctgggcttcatccagcagactttcacgaatcgcctcacgacggttcattgggttcatctgatagcttttgcggtcgccttttaatgcgcttccggcagcttcacggaacgggccataaaaggaggaggcgaacttggtgctatagctcataatcgccgtatctttaaatcccgcagcgtccagcgcctgacgaatcgcctgtacctggccgtccatcgcggcggaaggggcgatgaagtctgcacctgcagcagctgcaaccacggcttgcttgcctaaattttccagagtcgcgtcgttgtcgacgccatgctcgcacagcacaccgcagtgaccgtgagaagtgtattcacagaagcaggtgtcactcataacgatcatttctggcacggtctgcttgcagatgcggctcatacgcgccaccagtccatcttcccgccaggcatcgctgccggtttcatcggtatggtgagagatgccaaaagtcatcacggaacgaataccggcgttggcgatgcgttcaatttcgcgtgccagatgtttctctggaatgcgcatcacgcctggcatggcttcaacggctttgtagtcgtcaatttcttcttcaacaaagatcggcaacaccaggtcgttaaggctaagtgttgtctcttcaaacatagcgcgcagcgcaggagatttgcgcaggcgacgagggcgttggattaagtctgtcatggtctgcctgatgtttgtggaatcgaggggcatagtatacctgaagcagggtagggatgttttacgaaagttgtcgcgatgttgacaagaagagaatggaagagaggccaggacatctttttaatagaaacagcaataattttatattcactgaaaatatttttaatcttgaatattatcgggcgttaaaatattacattgtggttttcaatgcgttatccgcagcgtgacgctccagcgccagttcaatcaaacgtgtgatcagatcggtgtaacccagaccgctggcttgccacagcttcggatacatactgatattagtgaagccaggcagggtgttgatctcgttgatcaccacttcgttctctggggttaaaaacacgtctacacgcgccatgcctgcgcatcccaacgtttgataagcctgaacggcaatcgcccggatcttatcgttgatttctggcgcaatggctgccggaactaccactttcgcgccatcttcgtcaatgtacttggtgtcgtaggcatagaaatcgctggtgagtacgatctctccacaggtgctggcttgcggattgtcgttgcccagaactgcgcattcgatctcacgacctttgatcccttgctcaacgatcactttatgatcgaactcgaacgccagatcgacggcaattgcgtactgttcttcactggttactttgctgacaccaacagaagagccctgattagccggttttacaaacagtggtaaccccagtttagactccacttcggcaaaactaatgttgtgacgattggcgcgcgtcagggtaataaatggcgcaatgttcagcccggcatcgcgtagcagacgtttggtgacatctttgtccatacaggctgcactagccagaacatcagaacctacaaacggtaaattggcgacccgcagcattccctgcaaggaaccatcttcgcccagcgtaccgtggacaatcgggaaaatgacatccaccgtcggcaacggctgaccgttttgcgcgtcgataagctgatgctcatgtttacctggcacctgcgcaaggctggtcgcgctagggcgcaacgcaatatgggcaggatcgtctgcatttagcagataattgctggcatcgctgacgtgccattgcccttgtttatcaatgcccagcagcacaacgtcgaagcgacttttatcaatggcatcgacaatgttttttgcgctttgcagagacacttcatgttccgcacttttaccaccaaaaacgattcctacccgcagtttttccatcttaaaaacctatcccgtctaacacaaagtgcatacattaccacgacaaaacgggggattcgcggccttctgaaagattgttgcaatcttctgctgacaaagcgtgcaacgtactggtgaagaaagtgcgttatctcaaagatgtgcgcaagatcacaaaaatgatgaacgggaagctaatttattcctggcttaaatggccatgcggtgagtttttttctcttaattataagttaacgaagagaatatatttcataacttttatttataataaaggttgataattaaaagcctatattttgtgtgggtaattatttaaataagagaaacgtttcgctggtaatcaaacaaaaaatatttgcgcaaagtatttcctttgtcataaaaataatacttccagacactatgaagttgtgaaacataatgttaacttctccatactttggataaggaaatacagacatgaaaaatctcattgctgagttgttatttaagcttgcccaaaaagaagaagagagcaaagaactgtgtgcgcaggtagaagctttggagattatcgtcactgcaatgcttcgcaatatggcgcaaaatgaccaacagcggttgattgatcaggtagagggggcgctgtacgaggtaaagcccgatgccagcattcctgacgacgatacggagctgctgcgcgattacgtaaagaagttattgaagcatcctcgtcagtaaaaagttaatcttttcaacagctgtcataaagttgtcacggccgagacttatagtcgctttgtttttattttttaatgtatttgtacatggagaaaataaagtgaaacaaagcactattgcactggcactcttaccgttactgtttacccctgtgacaaaagcccggacaccagaaatgcctgttctggaaaaccgggctgctcagggcgatattactgcacccggcggtgctcgccgtttaacgggtgatcagactgccgctctgcgtgattctcttagcgataaacctgcaaaaaatattattttgctgattggcgatgggatgggggacagcgaaattactgccgcacgtaattatgccgaaggtgcgggcggcttttttaaaggtatagatgccttaccgcttaccgggcaatacactcactatgcgctgaataaaaaaaccggcaaaccggactacgtcaccgacagcgctgcaagtgcaaccgcctggagtaccggtgtcaaaacctataacggcgcgctgggcgtcgatattcacgaaaaagatcacccaacgattctggaaatggcaaaagccgcaggtctggcgaccggtaacgtttctaccgcagagttgcaggatgccacgcccgctgcgctggtggcacatgtgaccagccgcaaatgctacggtccgagcgcgaccagtgaaaaatgtccgggtaacgctctggaaaaaggcggaaaaggaagcattaccgaacagctgcttaacgctcgtgccgacgttacgcttggcggcggcgcaaaaacctttgctgaaacggcaaccgctggtgaatggcagggaaaaacgctgcgtgaacaggcacaggcgcgtggttatcagttggtgagcgatgctgccagtctgaatagcgtgacggaagcgaatcagcaaaaacccctgcttggcctgtttgctgacggcaatatgccagtgcgctggctaggaccgaaagcaacgtaccatggcaatatcgataagcccgcagtcacctgtacgccaaatccgcaacgtaatgacagtgtaccaaccctggcgcagatgaccgacaaagccattgaattgttgagtaaaaatgagaaaggctttttcctgcaagttgaaggtgcgagtatcgataaacaggatcatgctgcgaatccttgtgggcaaattggcgagacggtcgatctcgatgaagccgtacaacgggcgctggaattcgctaaaaaggagggtaacacgctggtcatagtcaccgctgatcacgcccacgccagccagattgttgcgccggataccaaagctccgggcctcacccaggcgctaaataccaaagatggcgcagtgatggtgatgagttacgggaactccgaagaggatagtcaagaacataccggcagtcagttgcgtattgcggcgtatggcccgcatgccgccaatgttgttggactgaccgaccagaccgatctcttctacaccatgaaagccgctctggggctgaaataaaaccgcgcccggcagtgaattttcgctgccgggtggtttttttgctgttagcaaccagacttaatggcagatcacgggcgcatacgctcatggttaaaacatgaagagggatggtgctatgaaaataacattactggttaccttgcttttcggtctggtttttttaaccaccgtcggcgctgccgagagaactttaaccccacaacaacagcgtatgacctcctgtaatcagcaggcgacggcgcaggcgttgaaaggggatgctcgtaagacctacatgagtgattgcctgaagaacagcaagtctgcgcctggcgaaaaaagtttgacgccacagcagcaaaagatgcgcgaatgcaataatcaagcaacacaacaatctctgaaaggtgatgatcgtaataagtttatgagtgcctgcctcaagaaagccgcctgatacctgatagtgctaacgggtgagctacgaaaatggctcacccgaaatatcatacttctgcctttagctccgtctctataatttgggaaaattgtttctgaatgttcccaaaaataatgaatgatgaaaactttttcaaaaaagcggcggcgcacggggaggaacctcctttaactcctcaaaacgaacatcagcggtccgggctgcgcttcgcccgtcgcgtcagactaccccgtgcggttggcctggctggcatgttcttaccgattgctagtacgctggttagtcacccgccgccgggctggtggtggctggtgttggtcggctgggcgttcgtctggccgcatttagcctggcagatagcgagcagggccgtcgatccgcttagccgggaaatttacaacttaaaaaccgatgcagtattagcgggaatgtgggtaggcgtaatgggcgtaaacgtgctgccttccaccgcgatgttgatgattatgtgtctgaatttgatgggggcaggcggcccccgtctgtttgtcgcgggtctggtgttgatggtggtttcctgccttgtcaccctcgagctgacgggcattaccgtgagcttcaatagtgcgccgctggaatggtggctctcccttcccattattgtcatttatcctctgctgtttggctgggtcagctaccagacggcaaccaaactggcggaacataaacgcaggttgcaggtcatgagtacccgcgacggcatgacgggcgtgtataaccgacgtcattgggaaactatgttacgcaatgaatttgataactgtcggcggcataatcgcgatgcaacgttactgattatcgatatcgaccatttcaagagcatcaacgatacctggggccatgatgtgggcgatgaagcgattgtggcgcttacccgacagttacaaattaccctgcgcggtagcgatgtgattggtcggtttggcggcgatgagtttgcagtaatcatgtccggtacgccagctgagagcgccattaccgccatgttacgggtgcatgaagggctaaatacattacgtttgccgaatacgccacaggtaactttacggattagtgtgggggttgcgccgctgaacccacaaatgagtcactatcgtgagtggttgaaaagcgcagatttggcgctttacaaagcaaagaaagccggacgtaaccgcaccgaagtggcggcctgacgtccggcgaaagtcatcaggatttgctgagtttttcacttttttccatacacttcgtcatcgcttcgatcactgcagcacggaagcctttctcttccagtacgcgtaccgcttcaatggtggtgcctcccggactgcagaccatatctttcagtgcccccggatgttctcccgtttccagcaccatttttgcggaacccattaccgcctgagcggcaaatttatacgcctgggcgcgtggcatcccgcccagcacggcggcgtcggccatcgcttcgataaacataaatacgtaggctgggctagaaccgctcacaccgaccaccgggtggatcatcggctcagcaattacttccgcttcgccaaagcagcggaaaatattcagcacatcagcggtatcttctggggttaccagcgcgtttggcgttacggaggtcatcccggcattaaccagtgcgggagtgttcggcatggcgcggataattttccggtcatggcccagcgcgcgggcaagctggtcgagcgtgacacctgcagcaatagaaacgaccagagagtctttattcaggctggaggtgatttcgctaagcactttaatcatgatgccaggtttaacggcagcaaaaatgatgtcggcgatttgcgccacttcttgcgcgctttctgcggcgttgatgccgaactggtcatgcagggcggcgactttatccggggagggggtgtatacccagatttgccctggaagcacctgaccgctggcaatcagaccgccgagaatggcttttcccatattgccgcagccaataaaaccgattttcttttccattgcctcactcctgccgtgaaattcattgttttgataatcgctggcagaagcataaacagaactatgccggaaggcaaaagcgcgacacaatagaggattacccaacaaaggatgactttatgacaatttgggtggatgccgacgcgtgtcccaatgtaattaaagagattttgtatcgcgcggcggaacgtatgcagatgccgctggtactggtagcaaaccagagtttacgcgtgccgccaagccgatttattcgtacgctgcgcgtcgcggcaggtttcgacgttgccgataacgaaattgtccggcagtgtgaagcgggcgatttggtgatcaccgcagatatacctttggctgctgaagccatcgagaaaggcgctgcggcgcttaatccgcgcggcgaacgttacacgccagcgaccattcgtgagcgcctgacgatgcgcgattttatggataccttacgtgccagtgggatccagaccggcggaccagatagccttagtcaacgtgaccgccaggcctttgccgcggagctggagaagtggtggctggaagtgcaacgtagtcgtggctaaatgtaatttattatttacacttcattcttgaatatttattggtatagtaaggggtgtattgagattttcactttaagtggaattttttctttacaatcgaaattgtactagtttgatggtatgatcgctattctcatgacaccggctttcgccgcattgcgacctattggggaaaacccacgatgacacaacctctttttctgatcgggcctcggggctgtggtaaaacaacggtcggaatggcccttgccgatagccttaaccgtcggtttgtcgataccgatcagtggttgcaaagtcagctcaatatgacggtcgcggagatcgtcgaaagggaagagtgggcgggatttcgcgccagagaaacggcggcgctggaagcggtaactgcgccatccaccgttatcgctacaggcggcggcattattctgacggaatttaatcgtcacttcatgcaaaataacgggatcgtggtttatttgtgtgcgccagtaagtgtcctggttaaccgactgcaagctgcaccggaagaagatttacggccaaccttaacgggaaaaccgctgagcgaagaagttcaggaagtgctggaagaacgcgatgcgctatatcgcgaagttgcgcatattatcatcgacgcaacaaacgaacccagccaggtgatttctgaaattcgcagcgccctggcacagacgatcaattgttgattttcgagcgcctatacttaacgttcatcccgtgaaataaggaagaacgatgccaacgaaaccgccttatcctcgtgaagcatatatagtgacgattgaaaaaggaaagccaggacagacggtaacctggtaccaactcagagccgatcatcctaaaccagacagcttgatcagtgaacatccgaccgctcaggaagcgatggatgcgaaaaaacgctatgaggaccctgacaaagagtgaccgcatcagactgctcggaagggattctgagtgccactacaagggatctgcgtcacatttttcataattcatgtttttctaataattagaatattaaacaataacaatccattactggaatcatttggaatctttacattatgccgtgcacgtctgctgctacgctttttgtcatttgtagcacaagtaagtgtcagcagtggtgcttcacacttgcccggtaattaacgacgaaagaaaagtaaggtggatgaacaatgagtgcgagcttggcgatcctgaccatcggcattgtacctatgcaggaagttttgccgctcctgacggaatacattgacgaagataatatttcccatcatagcctgctggggaagttaagtcgtgaagaagtgatggcggagtacgcgccagaagcaggcgaagacaccattctcacattattaaatgacaaccagctggcccatgttagccgtcgcaaagtggagcgtgacctgcaaggtgtggttgaagtgctcgataatcagggttatgacgtcattttattaatgagtacagcaaacattagtagtatgactgcgcgtaatacgatctttcttgagccgagccgaatattgcctccactggtttcctctattgttgaagatcatcaggtgggggttatcgttccggttgaggagatgctgcccgttcaggcgcaaaaatggcaaattttgcagaaaagcccggtatttagtttgggtaaccccattcatgatagtgaacaaaaaatcattgatgccgggaaagaattactggcaaaaggggctgatgtcatcatgctggattgtttaggatttcaccaacgtcatcgcgatttactgcaaaaacagctcgatgttcctgtcttgctgtctaacgtattgattgcacggctggctgcggaattactggtgtaattttgcgtgacagccagcgcctctggcccctatagtgaagtagatgttcaactaccaaacagggccagtttatgcttcaaagtaatgagtacttttccggcaaagtgaaaagtatcggcttttccagcagcagcactggtcgcgccagcgtgggtgttatggttgaaggcgaatacaccttcagcaccgctgagccggaagagatgacggtaatcagtggcgcgctgaatgtgttactgcctgacgcgaccgactggcaggtgtatgaagccggtagcgtgtttaatgttcccggtcacagtgagtttcatctgcaagttgccgaacccacctcttatctgtgccgctatctgtaattcctcgccttccccttgaacgggagggcatttttctgaaatatcctttctttagcccataataatatttcctttgctgcgattttttcaatttccgatatattcataatttatcaaggttgatataaatatcagtgaagatctccagatattgttgcggaactggctacgataaaagataaatcagatgatgaatggtggcgtgcattgctgcaaagtcgcaatgatcatttacgccaaacggcattgcgcaacgcacataccccggcgttgttgttaacgacattgactgagcctcaggatcggagcctggctattaataatccacagctggctgccgatgtgaaaacggcgtggttaaaagaggatccaagtttactcttatttgtcgaacaacccgatcttagcctgttacgtgatttagtgaaaaccggggcaacgcggaaaattcgcagtgaagcgcgtcaccggcttgaggaaaaacaatgacacaacgtccatggagcaagttacagcgtaaaacgcataatattgctgcgctaaaaattattgctcgccgtagcgaataattatatgcctggtgtggcttcgtacgccggataagacgcggcaggcgtcgcatccggcattaaaggaaaatcagcaattaacgttgtgcttcgccacctaatccttcaatcaggttttgaattaacgctgccagttcaccagtcatcaggatgaaatcggcatcaaaacgctgggcgaaatcttcacggtcgatatcttcgttttgatcgcgcagctcgtcgcagaacttcagacgcttgaggctaccatcgtcgcacatcacaaactgaatgcgctgctgccagtcgagcgccagtttagtcaccacttttccggcttcaatgtgattggtgatctcttcgctggtcagatcttgtttcttcgcgcggatcacgccgccatcttccagcaagcttttcagctcggcttcatcaagcagctggaagccctgtgccgcactaccggagcgaacccattcggtcagcgtcagttcaatcgggttttccatgctcaatggtacaaccggtaagctccccaggcttttacgcagtaatgccagcgtatcttccgcttttttggcactggcgcagtccaccataatcaaaccgttaaccgtgtcgatccacatcattgtctggctaaaacggctgaaagcacgcggcagcagagagtgcagcacttcgtctttcaggctatctttttcggttttcttcagcttacgcgcctgttccgcttccagtttggcgattttcgcttccagcgcctgtttaatcaccggagacgggaggattttttcttctttgcgcgcgcagataacaatttgaccattggcaacgtgcgttaacgcatcgctgtggcttcccatcggaggaacccagcccatcttcgccatgtcctggctgccgcatggggtaaatgccatgctggctagctgtttttccatctcttctgcacgcaggctaatctcgcggctaagacggtaaaccattaaatttttgaaccacagcatgataatttccacggccttgtcgttaaatttagcgggcatgataacgaattgtcggcggccttgcattgccaatccggttgtccgtctctacgctattgatattgaaaaaaataaggagagtaccgtgcgtataggtatcgatttaggcggcaccaaaactgaagtgattgcactgggcgatgcaggggagcagttgtaccgccatcgtctgcccacgccgcgtgatgattaccggcagactattgaaacgatcgccacgttggttgatatggcggagcaggcgacggggcagcgcggaacggtaggtatgggcattcctggcagtattagcccttacaccggtgtggtgaagaatgccaatagtacctggctcaacggtcagccattcgataaagacttaagcgcgaggttgcagcgggaagtgcggctggcaaatgacgctaactgtctggcggttagtgaagcagtagatggcgcggcagcgggagcgcagacggtatttgccgtgattatcggcacgggatgcggcgcgggcgtggcattcaatgggcgggcgcatatcggcggcaatggcacggcaggtgagtggggacacaatccgctaccgtggatggacgaagacgaactgcgttatcgcgaggaagtcccttgttattgcggtaaacaaggttgtattgaaacctttattagcggcacgggattcgcgatggattatcgtcgtttgagcggacatgcgctgaaaggcagtgaaattatccgcctggttgaagaaagcgatccggtagcggaactggcattgcgtcgctacgagctgcggctggcaaaaagcctggcacatgtcgtgaatattctcgatccggatgtgattgtcctggggggcgggatgagcaatgtagaccgtttatatcaaacggttgggcagttgattaaacaatttgtcttcggcggcgaatgtgaaacgccggtgcgtaaggcgaagcacggtgattccagcggcgtacgcggcgctgcgtggttatggccacaagagtaaaaaacgtaggcaattggcgcatcatgcctgatgcgacgcttgccgcgtcttatcaggcctacaaaaggtgccagaaccgtaggccggataaggcgttcacgccgcatccggcaataagtgctccgatgcctgatgcgacgcttgccgcgtcttatcaggcctgcaaaatgtgccagaaccgcgtagggcggataaggcgttcacgccgcatccggcaataagtaatgagcaccgagactataacttaccccagtggtttcgccagcaccggagtatccgccgcttgctggcgcttatagcgaccatacagcagcaagctgctcatcgcagcaaagctaagcagggcggcaggcagcgccacgtaattatatgccagccccagcgtcagcatcatacctccgcaatatgcgccgacggcgctaccgaggttaaacgctatttgcccacctgcggcacctaataactctccgcctttggcgttttgtagtaacaatatttgtagcggtgcactaagggcaaataatcccgcgcaacaaataaaagcaaaaataaggctcgttgttttcatgccgccgcagaaaaagagcatcagcagtgccagtacaattataaagtcagttactgctgcaatgcgcagtggactataacgtccactaatcctgccacttagcatatttcccagcaccatccctagcccaactaacatcataataaaggtcatcgccgtttcgctaaaaccggaaataaacatcatgtatggctttacgtagctgaaccaggcaaacacacctgcgttgccaaacatcgtggcggcgaaaattaaccacggggccgggctgcgcaaaaagtgaaattgttcgcgcagatttcctttcgcctcgtcgcgaatatctggcacccaaaaatagacgcttgccatcaccgcaatattaaaaacagcgatcaataaaaaggtgtaacgccagctaaattcctgacttaaatacgttcccagcggaatgcccagcaaattggcgactgtcatcccggaaaccatccccgccacggcggcggtgacttttccgggtttgataattttacttaacacgatcgctccgacgccaaaaaatgcgccatgcggaaagccggataccagccgaccaatggcgagcatcaggtaagagctagagagcgtgaacatggcgttgccaatgacgcacaacgccaccagaaacaacaagatatgtttgagactgtagcggctggaaaagagtgcgatgattggcgcaccgaccaccacccccagtgcataatagctgatcatatgcccggcggcaggaatgctaattcctacgttatgcgccagctccgtgagcacgcccataatgccaaattcggccatccccaaaccaaacgtgcccagagccaaagataaaatgacttttttcataccaccatcacaaccaccagaacggctaccaatcaccgtagccaataaagtgatagcttgcaggataacgaccagcaaggccaagagataattcgcccctctgtattcattatcctgctgaatagttatttcactgcaaacgtactttccagtttgctgtagcccaggccgttgatctttttcactttgatctgcaccggaatacgctctttcatcgcttctacgtggctaatcacaccgatggttttgccactggcgttcagggcatccagcgcatcaagggcggtatccagcgtttcgctatccagcgtgccaaaaccttcatcaaggaacaggctgtcaatacgtgttttatggctgaccagatcgctaagcgccagcgccagcgccagactaacgaggaaactttcgccgccggaaagggtacgggtatcgcgtaccgcatctgcctgccaggtatcaacaacctcgacttccagcgcctcgctggctttgcgctgtaacagatagcgcccgtgcagccgggtaagttgctgattagcgagatggactaaattatccagcgtcagcccctgggcaaacttgcggaatttatcgccctctttggaacctattaggctattcagatatccccagtcctcaacctgctgcgtcatttgagcaatttgctgcattaaggtttgttgttgctgacggttatctgcatcctgcttcagctgctggcgaatctcgccttgactcgtggtgttttcacgcaacttttggtgagtttgcgctaactcttgctgaatctgctccaccgtcacagtgagagccaacccgtcgtcaggtcggtgttgttgatgctgtgccagcgtttctgctgtctgagtgaccagagtttgcgcctgacggcgctggttttccagattctgcttgagctgttccagctgcgttagtgtttgttcatccattagcgccgcaaggaacgcctgctgatcgtcaaagacgctggcctgtagcgcggtgtcaaactgcgcctgggctttttgcagactttgcgccgccagaacatcctgttgctgtaacgtctgctgctggctgtgtaatgcgagacattgttcatgtacctgccgccagttttccaataccacagtttcttcgcagtgcgggagttcatcactttgcggcaacgtttccagaatcggcgtcagctgctgaatacggttttgcagcgcggttaattcgttctggcgttgctgccagctctgcgcttcttgctgacgtgtcgccaaccagctctcttcttcatcttcctgtggcaatgtcagtgcataacccgtcaatgtcgttaaaagtagttgctggcgttgttcaatttgctgttgatactggataatttgctgattatgcgcggcaatctgcccttgtaattcatgccgttggctgagtaaccgcagctggcgttcgtgctcatcttgtgcatccagccacggttgaatatcgtccagtggctgcaaggtgatattgaggctggccgtgacggcttgccattgttgagtaagtgcttgctcatcttgtcggaggctttgcgcttcgttttcatcacgctgaagctgctttgttatggcgtccagttgcccacgtagcgtcgcaccttcttcaccgagctttttaacttcgttttccagcgccagtaatcgagactgattaacgccaggctccagcgcctgatacgcctcgaccgccgggtggctggtggaaccacaaagtgggcaaggctgacccgcctgtaactgtgcacgttgagcttccagcgttttgatgcgcgcttcctgctcgcaaatggttttcacatcggcaagttgctgcgtcttttctttataacgctggcgcatttcgttaagtgcggcgttacgttgcgtctgttcttgcgtgacattctggatagcgacctgtaactgcgccagacgtttttgttggggaacaatctgtccatgcagcgcgaccaggtgctgacgcagtgggcgttgctcagcatgttgcgccagggcggtagcaacttcatcggcggttaacgtcaacgtgatcgccgcaagcgcattaagtttttgctcagcatgggttaactgttgctgccattgccgcagatgctcgcgatcgctggtttgttgggagaactgcgcacgccaacccgccggttcgttgttccactgacggaagcggtcgtgttcctgtaaccaggtattcaggctttgttgctgctgctgtaattctgcactctgcttcgccgcgtggtggcgaatgctcgcgcgaagcgccattgtgctctgtaagcgagtatttacttcttcaatctgctggcgaatatgcgccagcgccgcgctgtgttctgcgatgcgttcccagtgtggacgaagatttcgtgccggttgtgccagactaagcgccgccagttgaggttgcgctttttcttcttcggctaacgcctgttgcaaggcctgctgacggcggctggcttcttgctgcaattcgtcctgacgcgttaaccagtttaggctttgttgttcttgctgctgcgcggtaattaactgtttttcttcgtcagtaagtacctgcaaactcgctgtcaggctttgcacttgttccggcgtgagcaacgtgacgccgctggcctgcgcttgcagcttctccagctctgtgcgggcgcttttgtgctgctcaaaaaccatcgcgctgatttgcccgtagatttcagtgccggttaactcctcgagcaattccgcgcgttctttgggtttggcattcaggaaggcagcaaattgcccctggctaagcagcatgctacgggtgaagcgcccgtaatccagcccggttaacgtcgctgtcagttccagcttatctttcactttgtcggcgagaattttgccgtcggcgcagcgcgccagctctacgcgtggcacctgcaaattaccgtcgggttggttacgcgcccgattctggctccagaatgcacggtacgcttcacctttcacttcaaactccacctccgccagacattcggcggtatcgcgggtcatgagatcattttggctttgactaacgttagagagacgcggagtttcgtgatacagcgccagacaaatggcgtccagcagggtggttttccccgcacctgttgggccggtaatagcaaacagcccgttgctggcgaacggctcgcgggtgaaatcaatcttccattcgccttttaaactgttcaggtttttcaggcgcaggctgagaattttcatgcttcgtgttctccggcgagggtatgcaacgtcgtggtgaaaagatgctgcagacgttgctgctggctttcatccagttcttccagtgccagacggcgattgaacacctcttcgacgctgagttcgctgagggtttcacgctgttggctggctaacacacgctcgcgctgttcacgactccgacgtaccagcaatacttcgacaggcaaactttcggttaatgcctggattttgcgctgaatatcatgcagatactcatcagtagtgatttcgatatccagccagacaggtggctcctggcttacatcgcgccactgttccagctgtgcggtaatgctcgccagatcgcctttcagcactgccatgggttgcgttaccggtacgttcaggttttccacgctctctaatttgccgttactaaatgtcaccagatggacatatttactcttaccgcattcatcaaaactcagtggaatgggggagccgcaatagcgaacatgttccatgccgccaataatctgtgcgcggtgaatatgcccgagcgcgatgtagtcggctggtggaaagttttgtgccggaaacgcgtccagcgtgccaatataaatgtcacgcacggcgtcacttttactggcccccacggtcgttaaatgtcccgtggcgatgatgggcagaggctgatcgccgcgcagtttgcaggcatcggcatagtgttgttggtaataatcggtaatcgctgccagtaaatgctgctgtttttcaataccgttaagccccgcctggctggtaataatgtcacgcggacgtaaaaacggaatggggcacagcactgcgcctggcgtcccgtcgcgacgaggcaagatttgcggcgcatgtccggcgctggcgaccacggtagtattgaggaacgccatgatatcgcggctttcattcagcgtggcgacgctgtcatggtttcctgccagtaccaccagatgacagccagtttgctgtaaattgacaacaaaacggttgtataacgtgcgggcgtaactgggcgggctgccggtatcgaaaacatcaccggcaacaataatcgcatccacctgatgggtttgtgctgtctccagcagccagtcaagaaaagcctgatgttcagcttcgcggcttttactgtagaagttctggccgagatgccagtcactggtgtgaaggatgcgcataacggttccctggcgaaaaagcatgggcgcgattatacccaaacagatgtgccatttgcttttttctgcgccacggaaatcaataacctgaagatatgtgcgacgagcttttcataaatctgtcataaatctgacgcataatgacgtcgcattaatgatcgcaacctatttattacaacagggcaaatcatggcgagacgtattctggtcgtagaagatgaagctccaattcgcgaaatggtctgcttcgtgctcgaacaaaatggctttcagccggtcgaagcggaagattatgacagtgctgtgaatcaactgaatgaaccctggccggatttaattctcctcgactggatgttacctggcggctccggtatccagttcatcaaacacctcaagcgcgagagcatgacccgggatattccagtggtgatgttgaccgccagaggggaagaagaagatcgcgtgcgcggccttgaaaccggcgcggatgactatatcaccaagccgtttagcccgaaggagctggtggcgcgaatcaaagcggtaatgcgccgtattagcccaatggcggtggaagaggtgattgagatgcagggattaagtctcgacccgacatctcaccgagtgatggcgggcgaagagccgctggagatggggccgacagaatttaaactgctgcacttttttatgacgcatcctgagcgcgtgtacagccgcgagcagctgttaaaccacgtctggggaactaacgtgtatgtggaagaccgcacggtcgatgtccacattcgtcgcctgcgtaaagcactggagcccggcgggcatgaccgcatggtgcagaccgtgcgcggtacaggatatcgttttagtacccgcttttaacgccttgctcatcggacgcagagcagggcttatgatttcttaactggagtatcttacgtgctggaacggctgagctggaaaaggctggtgctggagctgctactttgctgcctcccggctttcatcctgggtgcattttttggttacctgccctggtttttgctggcaagcgtaacaggactgcttatctggcatttctggaatttattgcgccttagttggtggctgtgggtggatcgcagtatgaccccgccaccggggcgtggtagctgggaaccgctactatacggcttacaccagatgcagctgcgaaataaaaaacgccgccgtgaactgggcaatctgattaaacgctttcgtagcggcgcggagagcctgcccgacgcggtggtgctgaccacggaagagggcggtattttctggtgtaacggtctggcgcaacaaattcttggtttgcgctggccggaagataacgggcagaacatccttaacctactgcgttacccggagtttacgcaatatctgaaaacgcgtgatttttctcgcccgctcaatctggtgctcaacaccgggcggcatctggaaattcgcgtcatgccttatacccacaaacagttgctgatggtggcgcgtgatgtcacgcaaatgcatcaactggaaggggcgcggcgtaacttttttgccaacgtgagccatgagttacgtacgccattgaccgtgttacagggttacctggagatgatgaatgagcagccgctggaaggcgcggtacgcgaaaaagcgttgcacaccatgcgcgagcagacccagcggatggaaggactggtgaagcaattgctgacgctgagcaaaatagaagccgcaccgacgcatttgctcaatgaaaaggttgatgtgccgatgatgctgcgcgttgttgagcgcgaggctcagactctgagtcagaaaaaacagacatttacctttgagatagataacggcctcaaggtgtctggcaacgaagatcagctacgcagtgcgattagcaacctggtctataacgccgtgaatcatacgccggaaggcacgcatatcaccgtacgctggcagcgagtgccgcacggtgccgaatttagcgttgaagataacggaccgggcattgcaccggagcatattccgcgcctgaccgagcgtttttatcgcgttgataaagcgcgttcccggcaaaccggcggtagcggattagggttagcgatcgtgaaacatgctgtgaatcatcacgaaagtcgcctgaatattgagagtacagtaggaaaaggaacacgtttcagttttgttatcccggaacgtttaattgccaaaaacagcgattaatccgcctttgtcatcttttattgccataagccagtcgatgctggcttattttctttgcagtcaaaatacgggcgttagattttacaacgattggtgattttttgttcgcatgattagccatgtctttttcacggaaatagtgttttatactggttggtgatttcttatcgctatatacctctggtttttagatccctccttgctttaaaacgttataagcgtttaaattgcgcttcaggtgctgtcatactgactgcattaacgcggtaaatcgaaaaactattcttcgccgcgcctggttgggagtatttcccgctaaaattgtttaaatataccgctgtatcatccccagggattggcacaaaaatttaacgttacaacaccacatccacaggcagtatgatttatgacccatcaattaagaagccgcgatatcatcgctctgggctttatgacatttgcgttgttcgtcggcgcaggtaacattattttccctccaatggtcggcttacaggcaggcgaacacgtctggactgcggcattcggcttcctcattactgccgttggcctgccggtattaacggtagtggcgctggcaaaagttggcggcggtgttgacagcctcagcacgccaatcggtaaagtcgctggcgtactgctggcaacggtttgttacctggcggtggggccgcttttcgctacgccgcgtacagctaccgtttcctttgaagtggggattgcgccgctgacgggtgattccgcgctgccgctgtttatctacagcctggtctatttcgctatcgttattctggttagcctctatccgggcaagctgctggataccgtgggcaacttccttgcgccgctgaaaattatcgcgctggtcatcctgtctgttgccgctattgtctggccggcgggttctatcagcacggcgactgaggcttatcaaaacgctgcgttttctaacggcttcgttaacggctatctgaccatggatacgctgggcgcaatggtgtttggtatcgttattgttaacgcggcgcgttctcgtggcgttaccgaagcgcgtctgctgacccgttataccgtctgggctggcctgatggcgggtgttggtctgactctgctgtacctggcgctgttccgtctggggagtgacagcgcgagcctggtcgatcagtctgcaaacggcgctgctattctgcatgcttacgttcagcacacctttggcggcggcggtagcttcctgctggcggcgttaatcttcatcgcctgcctggtaacggcagttggcctgacctgtgcttgtgcagaattctttgcccagtacgtaccgctctcttatcgtacgctggtgtttatcctcggcggcttcagcatggtggtttctaacctcggcttaagccagctgatccagatctccgtaccggtgctgaccgctatttatccgccgtgtatcgcactggttgtattaagttttacacgcagttggtggcataatagctcccgcgtgattgctccgccgatgtttatcagcctgctttttggtattctcgacgggatcaaagcatctgcattcagcgatatcttaccgtcctgggcgcagcgtttaccgctggccgaacaaggtctggcgtggttaatgccaacagtggtgatggtggttctggccattatctgggatcgcgcggcaggtcgtcaggtgacctccagcgctcactaaatcactgaacatttgttttaaccacggggctgcgatgccccgtggttttttattgtgttgatgggttaggaattgatggaaagtaagaacaagctaaagcgtgggctaagtacccgccacatacgctttatggcactgggtagtgcaattggcaccgggctgttttacggtagcgcagacgccatcaaaatggccggtccgagcgtgttgttggcctatattatcggtggtatcgcggcgtatatcattatgcgtgcgctgggggaaatgagcgtacataacccggccgccagctctttcagccgttatgcgcaggaaaacctcggcccgctggcaggttacattaccggctggacctactgctttgaaatccttattgtcgccatcgccgatgtgaccgcttttggtatctatatgggtgtctggttcccgacggtgccgcactggatttgggtactgagcgtggtgctgatcatttgcgccgtaaacctgatgagcgtgaaggtattcggtgagctggaattctggttcagcttctttaaagtcgccaccatcatcatcatgattgtcgccggtttcggcatcatcatctgggggattggcaacggcgggcaaccgaccggtattcataacctgtggagcaacggcggcttcttcagtaacggctggcttggcatggtaatgagcttgcaaatggtgatgtttgcttacggtgggatcgaaattatcgggattaccgccggtgaagcgaaagatcctgagaaaagcataccgcgtgcgattaactccgtgccgatgcgtattctggtgttctacgtcggtacgctgttcgtcattatgtctatctacccgtggaatcaggttggcactgccggtagcccgttcgtgctgacgttccagcatatgggcattacctttgccgccagcattcttaactttgttgtgctgactgctagcctgagcgcaattaacagtgatgtatttggcgtaggccgtatgctccacggtatggcagagcagggcagcgcgccgaaaattttcagcaaaacgagccgtcgcggtattccgtgggttacggtgctggtgatgactaccgcgctgctgtttgcggtgtatctgaactacatcatgccggaaaacgtcttcctggtgatcgctagcctggcaaccttcgccacggtgtgggtgtggattatgatcctgctgagccaaattgccttccgtcgccgtttgccgccagaagaagttaaggcgctgaaatttaaagtgccgggtggggtagcaacgaccatcggcgggctgattttcctgctctttattatcgggttgattggttatcacccggatacgcgtatcagcctgtatgtcggtttcgcgtggattgttgtgctgttgattggctggatgtttaaacgccgccacgatcgtcagctggctgaaaaccagtaatccttgcgttctgtaagccggttcaggaggaaatcctgatccggctattccgaaagttatccgcccccgtcctcctcccccaaatatccttcagatgatgagtgatcctgcattaggctatggcaaggtgatcagattttcatcacaggggaattatgatgttaaatgcatggcacctgccggtgcccccatttgttaaacaaagcaaagatcaactgctcattacactgtggctgacgggcgaagacccaccgcagcgcattatgctgcgtacagaacacgataacgaagaaatgagtgtaccgatgcataagcagcgcagtcagccgcagcctggcgtcaccgcatggcgtgcggcgattgatctctccagcggacaaccccggcggcgttacagtttcaaactgctgtggcacgatcgccagcgttggtttacaccgcagggcttcagccgaatgccgccggcacgactggagcagtttgccgtcgatgtaccggatatcggcccacaatgggctgcggatcagattttttatcagatcttccctgatcgttttgcgcgtagtcttcctcgtgaagctgaacaggatcatgtctattaccatcatgcagccggacaagagatcatcttgcgtgactgggatgaaccggtcacggcgcaggcgggcggaagtacgttctatggcggcgatctggacgggataagcgaaaaactgccgtatctgaaaaagcttggcgtgacagcgctgtatctcaatccggtgtttaaagctcccagcgtacataaatacgataccgaggattatcgccatgtcgatccgcagtttggcggtgatggggcgttgctgcgtttgcgacacaatacgcagcagctgggaatgcggctggtgctggacggcgtgtttaaccacagtggcgattcccatgcctggtttgacaggcataatcgtggcacgggtggtgcttgtcacaaccccgaaagcccctggcgcgactggtacagctttagtgatgatggcacggcgctcgactggcttggctatgccagcttgccgaagctggattatcagagcgaaagtctggtgaatgaaatttatcgcggggaagacagtattgtccgccactggctgaaagcgccgtggaatatggacggctggcggctggatgtggtgcatatgctgggggaggcgggtggggcgcgcaataatatgcagcacgttgccgggatcaccgaagcggcgaaagaaacccagccggaagcgtatattgtcggcgaacattttggcgatgcacggcaatggttacaggccgatgtggaagatgccgccatgaactatcgtggcttcacattcccgttgtggggatttcttgccaataccgatatctcttacgatccgcagcaaattgatgcccaaacctgtatggcctggatggataattaccgcgcagggctttctcatcaacaacaattacgtatgtttaatcagctcgacagccacgatactgcgcgatttaaaacgctgctcggtcgggatattgcgcgcctgccgctggcggtggtctggctgttcacctggcctggtgtaccgtgcatttattacggtgatgaagtaggactggatggcaaaaacgatccgttttgccgtaaaccgttcccctggcaggtggaaaagcaggatacggcgttattcgcgctgtaccagcgaatgattgcgctgcgtaagaaaagtcaggcgctacgtcatggcggctgtcaggtgctgtatgcggaagataacgtggtggtatttgtccgcgtgctgaatcagcaacgtgtactggtggcaatcaaccgtggcgaggcctgtgaagtggtgctacccgcgagtccgtttctcaatgccgtgcaatggcaatgcaaagaagggcatgggcaactgactgacgggattctggctttgcctgccattagcgctacggtatggatgaactaacgttttataacgccttgcgactcgcctgcgccatcatccgcggataaaactgccagaagcgggtttcgagggcgtcataatgagcgtctaaatcgtaccaggagtcacgcagggcatccagacgtgggcggcggcttgccatgccgtttaacacgttctggatgaaatccatatcgcgatagcgcaccagccactgctcactccacaagtaattgttcagattgataaaacgtggcggactgtccggcaaaatcgtcatcacttgctcgcgggcataacagacaaattcctgtagcggaaagtccgggctcagctggctccagtggcgggaaagaaagtgatcccacatgacatccagcgtaataggcgcaacgcggcgcgtttcactacgaaaccactcccgtgcttcgcggacttccggcagattgtcagtcaatacgtcgatacgtcgatgcatatgaatgccagccacgacgtcgggcggaaaactttcttcaggatttccgcgtacgaaatcagccagtaaattgccggaaaggctgctttccgcgagatgggctaaatgcaggtgagctaaaaaattcatcgattatattctatccaaaagggggtaaaggttgcagggagagcgccccggcactagactacccgcctcttattttagtctgagtcagtgtcatgcgcgttaccgatttctcctttgaattgcccgaatccctgattgcccactatcccatgcctgaacgcagtagctgtcgtttactgagcctggacgggccgacgggcgcgctgacgcacggtactttcaccgatttacttgataagctcaaccccggcgatcttctggtttttaataatacccgcgtgatcccggcgcgcctgtttgggcgtaaagccagcggcggcaagattgaagtgctggttgaacggatgctcgacgacaaacgcattcttgcgcatattcgcgccagcaaagcgccaaaacctggcgcagaactgctgctgggcgatgacgaaagtattaacgcaacaatgaccgcgcgccacggcgcactgtttgaagtcgaatttaatgatgaacgcagcgtgctggatattctcaacagcatcggccatatgccgctgccgccgtatatcgaccgtccggacgaagacgctgaccgcgaactttatcaaaccgtttatagcgaaaaaccgggcgcggttgcagccccgaccgcaggtctgcattttgacgagcctttgctggaaaaattgcgcgccaaaggcgtggagatggcgtttgtgacgttgcacgttggtgcgggcaccttccagccggtgcgcgtcgacaccattgaagatcacatcatgcacagcgaatacgctgaagtaccgcaggatgtggtagacgcggtactggcggcgaaagcgcgcggtaaccgggtgattgcggttggcaccactagtgtacgtagcctggaaagcgcggctcaggcagcgaaaaacgatctcattgaaccgttcttcgacgatacccaaatctttatctatccgggcttccagtacaaagtggtcgatgcgctggtgacgaacttccacttgccagagagcacgctgattatgctggttagcgcctttgccggttatcaacacaccatgaacgcctataaagcagcggtagaagagaaatatcgcttttttagttacggtgatgcgatgtttatcacgtacaatccgcaggcaattaatgagcgcgtcggggagtaattccgcggcgctggtttaaaacgttggactgtttttctgacgtagtggagaaaaaatgaaatttgaactggacaccaccgacggtcgcgcacgccgtggccgcctggtctttgatcgtggcgtagtggaaacgccttgttttatgcctgttggcacctacggcaccgtaaaagggatgacgccggaagaagttgaagccactggcgcgcaaattatcctcggcaacaccttccacctgtggctgcgcccgggccaggaaatcatgaaactgcacggcgatctgcacgattttatgcagtggaaggggccgatcctcaccgactccggcggcttccaggtcttcagccttggcgatattcgtaaaatcaccgaacagggcgtgcacttccgtaacccgatcaacggcgatccgattttcctcgatcctgaaaaaagtatggagattcagtacgatcttggtagcgatatcgtcatgatctttgatgagtgtacgccgtatcctgctgactgggattacgcaaaacgctccatggagatgtctctgcgttgggcgaagcgtagccgtgagcgttttgacagtctcggaaacaaaaatgcgctgtttggtatcatccagggcagcgtttacgaagatttacgtgatatttctgttaaaggtctggtagatatcggttttgatggctacgctgtcggcggtctggctgtgggtgagccgaaagcagatatgcaccgcattctggagcatgtatgcccgcaaattccggcagacaaaccgcgttacctgatgggcgttggtaaaccagaagacctggttgaaggcgtacgtcgtggtatcgatatgtttgactgcgtaatgccaacccgcaacgcccgaaatggtcatttgttcgtgaccgatggcgtggtgaaaatccgcaatgcgaagtataagagcgatactggcccactcgatcctgagtgtgattgctacacctgtcgcaattatagtcgcgcttacttgcatcatcttgaccgttgcaacgaaatattaggcgcgcgactcaacaccattcataaccttcgttactaccagcgtttgatggcgggtttacgcaaggctattgaagagggtaaattagagagcttcgtaactgatttttaccagcgtcaggggcgagaagtaccacctttgaacgttgattaatattaataatgagggaaatttaatgagcttttttatttctgatgcggtagcggcaacgggtgcaccggcgcaaggtagcccgatgtctttgattttgatgctggtggtattcggtctgattttctatttcatgatcctgcgtccacagcagaagcgcaccaaagaacacaaaaagctgatggactccattgccaaaggtgatgaagttctgacgaacggtggcctggttggtcgcgtaaccaaagtagcggaaaacggctacattgctatcgcgctgaatgacaccactgaagtagttattaaacgtgacttcgtagctgccgtcctgccgaaaggcaccatgaaggcgctgtaattaaaatttttccctaagggaattgccgtgttaaaccgttatcctttgtggaagtacgtcatgctgatcgtggtgattgtcatcggtctgctgtatgcgcttcccaacctgtttggtgaggatccggctgttcagatcactggtgcgcgcggagtcgccgccagtgagcaaacgctgatccaggtccagaaaacgttacaagaagaaaaaataactgctaagtctgtggcactggaagagggcgctattcttgcgcgcttcgactccactgacacccagttgcgcgctcgtgaagcattaatgggcgttatgggtgacaaatacgtcgtggcgcttaaccttgccccggcaacgccgcgctggctggcagctattcacgctgagccgatgaagctcggccttgacctgcgtggcggcgttcacttcctgatggaagtggatatggacaccgcgcttggcaaactccaggaacaaaatatcgatagcctacgcagtgacctgcgcgaaaagggcatcccgtataccactgttcgtaaagaaaacaactacggcctgagcatcactttccgcgatgctaaagctcgtgatgaagccattgcgtatctgagcaagcgccatccggacctggtgattagcagccagggcagcaaccagctgcgtgcggtaatgagcgatgctcgtctgagtgaagcgcgtgaatatgcggtgcagcagaacattaatatcctgcgtaaccgtgtaaaccaacttggcgtggcggagccggtggttcagcgtcagggtgctgaccgtatcgttgttgaactgccaggtattcaggacactgcgcgtgcgaaagagattctgggtgcgacggcaacgctggaattccgtctggtaaacaccaacgttgaccaggccgctgcggcatccggtcgcgtaccgggcgactctgaagtgaaacagacccgcgaaggtcagccagttgtgctgtacaaacgcgtaattctgaccggtgaccatatcaccgactccacttccagccaggacgaatacaaccaaccgcaggttaacatcagcctcgatagcgctggtggtaacatcatgtctaacttcactaaggacaacatcggcaaaccgatggcaaccctgtttgtggagtacaaagacagcggtaagaaagatgcaaatggtcgtgcggttctggtgaaacaggaagaggtgattaacatcgccaacatccagtctcgtctgggtaacagcttccgtatcaccggcatcaacaacccgaacgaagcccgtcagctgagtctgctgctgcgtgccggtgcgttgatcgcgccgattcagattgttgaagaacgtaccattggcccaaccctgggtatgcagaacattgaacaggggctggaggcttgccttgccggtctgctggtttctattctgttcatgatcatcttctataagaagtttggtctgattgcgaccagtgctctgattgccaacttgatcttaatcgtcggcattatgagcctgttgccaggcgcaacgctgagtatgccaggtatcgcgggtatcgtcttaacccttgcggtggcggtcgatgcgaacgtactgatcaacgaacgtattaaagaagagttgagcaacggacgtactgttcaacaggcaattgatgaaggttatcgtggcgcattcagttctatcttcgatgcgaacatcaccacgctgattaaagtcatcatcctgtacgcagtgggtaccggggcaattaaagggttcgcgattactaccggtatcggtgtggcgacgagcatgtttaccgcgattgtcggtacgcgtgccatcgtaaacctgctatatggcggcaagcgcgtcaagaagctgagtatctgaggagtgcgatgtggcacaggaatatactgttgaacaactaaaccacggccgtaaagtctatgactttatgcgctgggactactgggctttcggcatctctggtctgctgttaatcgctgctatcgttattatgggcgtgcgcggctttaactgggggctggatttcaccggtggtacggttattgaaattacgctcgaaaaaccggctgaaattgacgtaatgcgtgatgcattgcaaaaagccggttttgaagagccgatgctgcaaaactttggtagcagccatgacatcatggtccgtatgccgcctgctgaaggcgaaaccggcggtcaggtgttgggcagccaggttctgaaggtgattaacgaatccaccaatcagaatgcagcagtgaagcgtattgagttcgtcggtccgagcgtgggggcagaccttgcgcaaaccggtgcgatggcgttgatggcagcgctgctgtctatcctcgtgtacgtaggtttccgctttgagtggcgactggcggcaggggtggttattgcgctggcgcacgacgttatcattacgctgggtattttgagcttattccatatcgagattgacctgaccattgtggcaagcttgatgagcgttatcggttacagccttaacgacagtatcgtggtaagcgaccgtattcgtgaaaacttccgcaagatccgtcgcggtacgccttacgaaatctttaacgtgtccttgacccagacgctgcaccgtaccttgatcacatccggtactaccttgatggttatcctgatgctgtacctcttcggtggtccggtactggaaggcttcagcctgaccatgcttatcggtgtttccatcggtactgcatcttccatctatgtggcatctgcgttggctctgaaactgggtatgaagcgcgaacacatgttgcagcagaaagtggaaaaagaaggggcggatcagccgagtattctgccgtaatcaagttcccgttgatgttgaaaatcccggtcagaagatcgggattttttttgatgtatggagattgcgaaaatccccgcatcttgggaaactgcgcgtaaccctacatttcatccaggtaacttttcatggctatcatcccaaaaaactatgcgcggttagaaagcggctatcgcgaaaaagcattaaaaatctatccgtgggtctgcggtcgctgttcccgcgagtttgtttattccaacctgcgtgaacttaccgttcaccacattgatcacgaccataccaataacccggaagatggcagtaactgggaattgttgtgtctctattgccacgatcatgagcatagcaaatataccgaagcggatcagtatggtacgaccgttatcgcaggggaagatgcgcagaaagatgtcggtgaagcgaagtacaacccattcgctgacctgaaagcgatgatgaacaagaagaagtgattaaaacgtaaaattgcctgatgcgctacgcttatcaggcctacgttatttcagcaatatattgaatttacgtgcttttgttggccggacaaagcgtttacgccgcatccggcatgaacaaagcacacgttgttaacaatcagaaatgccgggaataaatcccggcattttcataatcagaagttgtaacctactaccaggtaaccaccccagccggtagagcgaacgttgaagttgccgttgccgaagttcagttctgcatcgtcgttccactgaccaccgtcgtgccagtaacgagctacgacagagtagtgccagtgatcgtagttcagagccagaatatggctggaagcgatagagttattagtacgggtcttaataccgttgattgcgttaccgctgtcatcccctaaatcggaaccccagtcgaagttggtgaagccgatgtagctcagctgaccgccccacagatcggtaatcggcacaaagtatttaattttgaaacggtaaccgtcccactcgttttcgttcgctgcgccatagttctgccactggtatttcgcatagacgttcatggacaggctcatcggcaggccagtgtcgatatcggtacccagacccatgtaccaggtgctctggcgaccatctttattacgacccatgtcgtaaatgtagttgttcgcgaagtaccactctttgaacggaccgaagctaaggtcagtattggtcagcttgtcgatggagaaacgtggttcgatttccataaacagcggagaaccgtggttccagatacctttagcatcggagttaccgccgaagaataccggcgcatccgcataaccatagaagtcgaaccagtcttttttagcgaatgcttcgtactcaaggtaggtatcgttgcggatctgcggtccgaaacgggtgtgatagcttccgacaacgttaacgctctggtgccaccagtcggaaagatactgcggtttgtcgttttcagctgcgttgacagtaaaagagctagagagcgccagtaccgcaccggctgccagtaatgtttttttcatatgtatgccactgtttgaaaatcccttgcgggagtgaaaaaggcgcaaattgcgtttctaaatatttcgtatacagaggagcctattataaaaatcattgctcacaaaaatatgtttcgtttcacagttctatcatttacgtaatcgattgcgttcacgtttacacacattcgggcggggattgtactgactttcgcccttgttgcaaacttttactatcaatccaggtgatgtaagcagagtaacaaaatgacggggaaagatgttgcgggacgcacaaaatcgtcccgaaatacgtttactgcataacaggttgaatgtcgtggatacgtacaaagcctaactgatccacagaaatcccctttaactgtaacggaatatcaacatcgctgggggcgaggacgctggcaggggcattaatcaattgattctgcacattgatttcctgaaagttgtctattgttccctgaatttgcccatattcaacagttccgctgaatgcgggcaagggatcattgctctcaccctgaatacgtagtgtaagggtggtgccatctgcatcaggcgtaatattcaccaggctcatacgtaaagtaccgatctggctttccagtcttgccggtgttttcgctccaggcagaaggtaaaccccactgctggattttgcattcagcctgttttgctgagtgattttgactgtttcttgattgagttgcgtcatctcctggttcagcgtgctgacgctgtgtttcatctgtcgcacttcactttgctgcacacaggcgctaaggctgaacaggcttcccagcaggagcagtcgaaaaacgttagtattcataggtcgtccctttctcgtcgcaattagcctaatggtagagggtaaaagcagcgaaagcatcgatcctttatctcaaaagcgttgcgcctttgttgtatcgtcagttcagggtaaaatagatttccgttaaccacctggtcaggacgccgtatgcattgcccattctgtttcgccgtggacactaaggtaattgactctcgtctcgtgggcgagggtagttccgtacgccgccgtcggcagtgtctggtgtgtaatgaacgtttcaccacctttgaagtggcggagctggttatgccgcgtgttgtaaaaagcaacgacgtgcgtgaaccgtttaatgaagagaaattgcgtagcggaatgctgcgggcgctggaaaaacgtccggtgagttccgatgacgtcgaaatggcaatcaatcatattaaaagccagctgcgcgccaccggtgagcgcgaagtgccgagcaagatgattggcaatctggtgatggagcaattgaaaaagctcgataaagtcgcctatatccgttttgcctctgtctaccgcagtttcgaagatatcaaagaatttggcgaagagatcgcgcgcctggaggactaagccgtgcaggacgagtattacatggcgcgggcgctaaagctggcgcaacgaggacgttttaccacgcatcccaacccgaatgtcgggtgcgtcattgtcaaagatggcgaaattgtcggtgaaggttaccaccaacgtgcgggtgaaccacatgccgaagtacacgcgttgcgtatggcgggtgaaaaagccaaaggtgcgaccgcctatgtcacactcgaaccctgtagccatcatggtcgtacgccaccgtgctgtgacgcactcatcgccgctggcgtagcgcgcgtggttgccagcatgcaagatcctaacccgcaggtcgctgggcgtggactttaccgtctgcaacaggctggcattgacgtcagccacggcctgatgatgagtgaagccgagcaattgaataaaggctttctcaagcggatgcgcaccggctttccttatattcagttaaaacttggcgcaagccttgatggtcgcacggcgatggcgagcggcgaaagccagtggatcactagcccccaggcgcggcgtgatgtacaactactgcgcgcgcaaagtcatgccattttaaccagcagcgccacggtgctggcggatgatcctgccttaacggtgcgttggtctgaactggatgaacaaactcaggcgctctatccgcaacaaaatctccgtcagccgatacgtattgtgattgatagccaaaatcgcgtgacgccggtacatcgcattgtgcagcagcccggcgaaacctggttcgcgcgtacgcaggaagattctcgtgagtggccggaaacggtgcgtaccttgctgattccagagcataaaggtcatctggatctggttgtactgatgatgcaactgggtaaacagcaaattaacagcatctgggtggaagcggggccaacgctcgctggcgcattgctgcaggcgggtttagtcgatgagctgattgtctatatcgcacctaaactattaggcagcgacgcccgcggattatgcacgctgccagggcttgagaaattagccgacgccccccaatttaaattcaaagagatacgtcatgtaggcccggatgtttgcctgcatttagtgggtgcatgatctcccggctcgaaagggaagcagcgcacgaaatattatgctaaaatccgcccccctgcggggccatactcgaacccgaaggaagaaaatgaacattattgaagctaacgttgctaccccggacgctcgcgtcgccatcaccatcgcgcgtttcaacaactttatcaatgacagcctgctggaaggtgcaattgacgcactgaaacgtatcggtcaggtaaaagatgaaaacattaccgttgtttgggtgcctggtgcctatgagctgccgctggcggcgggtgcactggctaaaaccggtaaatacgacgcggtgattgcgctgggtacggttattcgtggtggcactgcccactttgaatatgtcgctggtggtgcaagcaacggcctggcgcatgttgcccaggacagcgaaattccggttgcttttggggttctgaccactgaaagcattgaacaagcgatcgaacgtgctggcaccaaagctggcaacaaaggtgcagaagctgcactgaccgcgcttgaaatgattaatgtattgaaagccatcaaggcctgaaattagtaaggggaaatccgtgaaacctgctgctcgtcgccgcgctcgtgagtgtgccgtccaggcgctctactcctggcagttgtcccagaacgacatcgctgatgttgaataccagttcctggctgaacaggatgtaaaagacgttgacgtcctgtacttccgtgagctgctggccggggtggcgactaataccgcatacctcgacggactgatgaagccatacctgtcccgcctgctggaagaactgggacaggtagaaaaagcagtactgcgcattgcgctgtacgaactgtctaaacgtagcgatgtgccatacaaagtggccattaacgaagcgatcgaactggcgaaaagcttcggcgcagaagacagccataagttcgtcaacggcgtactcgataaagcagcacctgtgattcgccctaacaaaaagtgatatccaggccggtagattcacggaagaccgttccatgatcgccggccttttcttttttacctgctgaggcataacgtatggcatgtggcgagttctccctgattgcccgttattttgaccgtgtaagaagttctcgtcttgatgtcgaactgggcatcggcgacgattgcgcacttctcaatatccccgagaaacagaccctggcgatcagcactgatacgctggtggcgggtaaccatttcctccctgatatcgatcctgctgatctggcttataaagcactggcggtgaacctaagcgatctggcagcgatgggggccgatccggcctggctgacgctggcattaaccttaccggacgtagacgaagcgtggcttgagtccttcagcgacagtttgtttgatcttctcaattattacgatatgcaactcattggcggcgataccacgcgtgggccattaagtatgacgttgggtatccacggctttgttccgatgggacgagccttaacgcgctctggggcgaaaccgggtgactggatctatgtgaccggtacaccgggcgatagcgccgccgggctggcgattttgcaaaaccgtttgcaggttgccgatgctaaagatgcggactacttgatcaaacgtcatctccgtccaagcccgcgtattttacaggggcaggcactgcgcgatctggcaaatagtgccatcgatctctctgacggtttgatttccgatctcgggcatatcgtgaaagccagcgactgcggcgcacgtattgacctggcattgctgccgttttctgatgcgctttctcgccatgttgaaccggaacaggcgctgcgctgggcgctctctggcggtgaagattacgagttgtgtttcactgtgccggaactgaaccgtggcgcgctggatgtggctctcggacacctgggcgtaccgtttacctgtatcgggcaaatgaccgccgatatcgaagggctttgttttattcgtgacggcgaacctgttacattagactggaaaggatatgaccattttgccacgccataaagatgtcgcgaaaagtcgcctgaagatgagtaatccgtggcatctacttgctgtcggattcggaagtggattaagcccgatcgttcctgggacgatgggcagcctggcagcgattccgttctggtatctgatgacctttttgccctggcagctctacagcctggtggtgatgctggggatctgtatcggcgtctatctttgtcatcaaacggcgaaagacatgggtgtgcacgatcatggcagcattgtctgggacgaatttattggtatgtggatcacgctcatggcgctgccgaccaatgactggcagtgggttgccgccgggtttgtgattttccgtattctggatatgtggaagccgtggccgatccgctggtttgatcgcaatgtgcatggcggcatggggatcatgatcgacgatattgtcgccggggtgatttccgcaggcatcctgtattttatcggtcatcactggccgctgggtattctgagctaattgtgcaccgatgcctgatgtgacgcttgtcacgtctcatcaggcctggactcttatttaaatcctacgacaggatgcggtttatacggcgtttccagttcggcaatctgttccggcttcaaagtgatatccaccgcgttcaatagctcatcaagctgttcttcgcggctagttccgataatcggtgcggcaatgcccggtttactcaacaaccaggccagcgcaacttgtgctcgtgtcgcccccagttcttcactgacgcctgttaaccgctctgcgatctgcgcgtcattttcatcgctttctttatagagatttttccccacctcatcagacaccagtcgtgcggtagtttctccccacggacgcgtcagacggccccttgccagcgggctccatggaattaccgccacgccctcctgataacacagtggtagcatctcgcgctcttcttcacgataaatcagattgtagtgatcctgcatactgacaaactgcgcccagccgtgctgtttttggagttccagtgcctgagcaaactggctagcgtgcatactactcgcgccgatataacgcgctttcccggcttttaccacgtcgttgagggcttccagcgtctcttcgatcggcgtgttgtaatcccagcgatgaatttgcaggatatcgacataatccatgccgagacgtcgcaggctgtcgtcgatagagcgcaaaatttgcgcacgggataatccttccggtaaatcaccaacgcgatggaacactttggtcgcaacgaccacgtcttcacgacgggcgaaatcccgcagtgcgcgaccgacgatctcttcgctgctgccgtcagaataactgttggcggtatcaaagaaatttatgccgccttccagtgcacgtttaattatgggacggctgctttcttccggcagtgtccatgcgtgattaccgcgatctggctcgccaaaggtcatacagccgaggcaaagtcgggaaacgcgaaggtcggtttttcctaaggggttgtattgcatgctgccactcctgctatactcgtcatacttcaagttgcatgtgctgcggctgcattcgttcaccccagtcacttacttatgtaagctcctggggcttcactcgtttgccgccttcctgcaactcgaattatttagagtctatgaataatttcttaagcatagcaggagtggagtagggattatgccagccaggccttgattttggcttccataccagcggcatcgaggccgagttcggcgcgcatttcttcctgagttccttgcggaataaagaagtccggcaggccaatgttcagcacgggtactggtttacgatgggccatcagcacttcgttcacgccgctgcctgcgccgcccataatggcgttttcttctacggtgaccagcgcttcatggctggcggccatttccagaattaacgcttcatcaagcggtttcacaaaacgcatatcgaccagcgtggcgttcaggctttcggcgactttcgccgcttctggcatcagcgtaccaaagttaaggatcgccagtttctcgccacgacgcttcacaatgcctttgccaattggtagtttttccagcggcgtcagttccacgccgaccgcgttgccacgcgggtagcgcaccgcactcgggccatcgttatagtgatagccggtatagagcatctggcgacattcgttttcatcgctcggggtcataatgaccatttccggtatgcagcgcaggtaagagagatcaaaagcaccctgatgggtttgaccgtcagcaccaacaatgcccgcgcggtcgatggcgaacaggaccggaagcttttgaatcgccacgtcatgcagcacctgatcataggcgcgttgcaggaaagtggagtaaatcgcgacaatgggtttgtacccaccaatcgccagacccgcagcaaaggtcaccgcgtgttgctcggcaattgccacgtcgaagtagcgatccgggaatttacgactaaactcgaccatgccggaaccttcacgcatcgccggagtaatcgccatcagcttgttgtctttcgctgccgtttcgcacaaccagtcgccaaagattttactatagctcggcaaaccgccgctacttttcggcaaacaaccgctggagggatcaaatttaggcacggcgtggaaagtgatcgggtctttttctgccggttcataaccacgaccttttttggtcatgatatgcaggaactgcgggcctttcaggtcgcgcatgttctttagcgtggtgataagccccagcacatcgtgaccgtccaccgggccgatgtagttaaagcccagctcttcaaacaacgtgccaggcactaccatgcctttaatatgttcttcggtgcgtttgagcagctctttaattggcggcacgccagagaaaacttttttcccgccttcgcgcagactagagtaaagcttaccggaaagcagctgtgccagatggttgttgagcgcgccgacattttcggaaatgctcatttcattgtcgttgagaatcaccagcatatcaggacggatatcgcccgcgtgattcatcgcttcaaacgccatgcctgcggtaatcgcgccatcgccaatgacacagacggtgcggcgatttttgccttctttttcggcagcaaccgcaataccaattccggcactgatggaggtactactatgcccgacgcttaatacgtcatattcgctttcgccgcgccacgggaacgggtgcagaccgcctttctgacggatggtgccgattttgtcgcggcgtccggtcaaaattttatgcggataagcctgatgccccacatcccaaatcaattggtcaaacggggtgttgtagacatagtgcagcgccacggtcagttcgaccgtgcccagcccggaggcgaagtgcccgctggaacggctcacgctgtcgagtaaatagcggcgcagttcgtcgcagagtttcggtaaactctctttcggcaacagtcgtaactcctgggtggagtcgaccagtgccagggtcgggtatttggcaatatcaaaactcatcaggggcctattaatacttattgtttatttattacgctggatgatgtagtccgctagcgcttccagtgcgctggtatcgagactctgttcagccagttgtttcaggctctgacgggcatcgtcgatcagatcccgggctttcttccgggcttgctcaagacccagaagtgcagggtaggtacttttaccaagttgctggtcggcaccctggcgttttcccaacgttgcagtatctcccaccacatccaggatgtcatcctgaacctggaaggcaaggccgatgctctctgcatacttgtcgagtaccggcagagcacgacgtcctttatctccggcgcttaatgcaccaaggcgaacggcggcgcgaatcaatgcgccggttttatgacgatgaatacgctcaagcgcgtccagaggtacgtgtttgccttccgcgtctaaatctaatgcctgaccaccgcacattccggcaataccactggcgctcgccagttcagaaatcatgctaattctgtcgcggtcgctcacttccggcatatcggcatcgcttaaaatgctgaacgccagcgtttgtaaagcgtcgccagcgagaatcgcgtttgcttcgccaaacttcacatggcaggttggcaaaccgcgacgcagatcgtcatcatccattgccggtaaatcatcatgaattaaactgtaagcgtggatacactcaacggcggcagcgggtgcgtccagcgtgtttgtgctaacgccgaacatatgaccggtggcataaaccaggaaaggtcgcaggcgcttaccacctaataatgcgccatactgcatggtttcgaccacgggagtgttctgaaagggcagtggggcgataaaacggctcagcgcctggttggcctgcttaacgcaggcttcgagttgctgcggaaagtccattactcattgtccggtgtaaaaggggttagagaggcgtcttcattgtcagacagcagaatttgtacgcgctgttcggcttgttgtaatttggcctgcccctgacgtgccagctgcacgccgcgttcgaactcgttcagcgcctcttccagcggcaggtcgccactttccagacgggttacaatctgttccagctcgctcagcgccttttcaaagctggcgggcgcctcatttttcttcggcataatgaatgtctgactctcaatatttttcgccccgtcatggtaacggactcagggcaaatagcaaataacgcgcaatggtaaggtgatgtgcacagcaaagcgatgttagtggtatacttccgcgcctggatgcagccgcaggtgtgggctgctgtatttttccctatacaagtcgcttaaggcttgccaacgaaccattgccgccatgaagtttatcattaaattgttcccggaaatcaccatcaaaagccaatctgtgcgcttgcgctttataaaaatccttaccgggaacattcgtaacgttttaaagcactatgatgagacgctcgctgtcgtccgccactgggataacatcgaagttcgcgcaaaagatgaaaaccagcgtctggctattcgcgacgctctgacccgtattccgggtatccaccatattctcgaagtcgaagacgtgccgtttaccgacatgcacgatattttcgagaaagcgttggttcagtatcgcgatcagctggaaggcaaaaccttctgcgtacgcgtgaagcgccgtggcaaacatgattttagcagcattgatgtggaacgttacgtcggcggcggtttaaatcagcatattgaatccgcgcgcgtgaagctgaccaatccggatgtgactgtccatctggaagtggaagacgatcgtctcctgctgattaaaggccgctacgaaggtattggcggtttcccgatcggcacccaggaagatgtgctgagcctcatttccggtggtttcgactccggtgtttccagttatatgttgatgcgtcgcggctgccgcgtgcattactgcttctttaacctcggcggcgcggcgcatgaaattggcgtgcgtcaggtggcgcattatctgtggaaccgctttggcagctcccaccgcgtgcgttttgtcgctattaatttcgaaccggtcgtcggggaaattctcgagaaaatcgacgacggtcagatgggcgttatcctcaaacgtatgatggtgcgtgccgcatctaaagtggctgaacgttacggcgtacaggcgctggtcaccggcgaagcgctcggccaggtgtccagccagacgctgaccaacctgcgcctgattgataacgtctccgacacgctgatcctgcgtccgctgatctcttacgacaaagagcacatcatcaacctggcccgccagattggcaccgaagactttgctcgcacgatgccggaatattgtggtgtgatctccaaaagcccgacggtgaaagcagttaaaagcaagattgaagcggaagaagagaagttcgacttcagcattctcgataaagtggttgaggaagcgaataacgttgatatccgcgaaatcgcccagcagaccgagcaggaagtggtggaagtggaaaccgtcaatggcttcggcccgaacgacgtgatcctcgatatccgttctatcgatgaacaggaagataagccactgaaagtcgaagggattgatgtggtttctctgccgttctataaactgagcaccaaatttggcgatctcgaccagaacaaaacctggctgctgtggtgtgagcgcggggtgatgagccgtctgcaggcgctctatctgcgcgagcagggctttaacaatgtgaaggtatatcgcccgtaatttgtggtttttacgtcgcatctggtcagatgcgacgtttgccgcatccgacattactcgtaataattataaatccctgccgccatcaccagttgacttgccacttcatgggctttttcacgcccaaccaacaggtcgataattttcagaccaaagtcgatagctgtacccggcccctggctggtcagcaattttacccgtgcatcccagacgacgcgcttgtccagccattgttcggcgggaattttgtctttcagcgtcgggaagccggtcatattaccaatcgggaagatatcgtgcggcaccagcacggtggctggcgcggcgcaaatagccgcgacgatacgcccggaacggtggaactgtttaacggtttcaaccagcagagtgctatcgcgaaaacactccgcgcctttaatgccaccaggcagcacgatcacgtcatattcgccatcagccacttcgaccagcggcgcatccgccagcagcttcacgccgcggctgcaggtaatcgccaggttaccatcgctggcgacgctggcagtggtgactttgataccgccgcgaaccagcagatcgatagtggtgacggcttcagtctcttcactaccaggggcgaggcaaaccagtgcgcttgcgctcatattcactctcctttctttttttaattaccaggggcgaggcaaaccagtgccgatgcgctcatattcactctcctttctttttaccatttcaaacaggcgggtgttttccggtacggcaatcccatgcgcgcgggcgcggcgtaagagaaaaccattgatatagtcgatttcagtgtggcgcagcgcgcggatatcctgcaacatgctgctgatattttccgctgtggcatcaatcacctgcatcacgtaatcacgcaaatcttctgcactagtatgatgcccttcgcgttcgatcaccgccgcgacttcttcgcatatctgcataatttcttgcggatgatgacgtaattcaccgttcgggcaattccagatggcagtcagtggattaatcacgcagttgactgccagcttgcgccacagctcggcgcgaatattgttatgccaggcaacgtcaggcaacacggtttgcaaaatatccgccagataactgtaatccccgtcctgttgccgtgccgggccaatatgcgtgataccgtttgccacatgaataatgacattgccgtcgcggcgggctgcatgggtggtggtgcccatcagtaatggctgctgaatgttttgcaactcttcgatggtgcccatgccgttgtgaattaacagtattggcgtagttacaggcagtgtggacgcgaggcttttgacggcatcggaaacctgccatgctttcagcgtcaccaggagcagatcgctggtggcgagaaaatcgggatcgttggcggtcaggctttcgttaaatatgctaccatctgtctcaaccagattcacgctacaataaggttgcggtacgcgcagccagccctgaacttcatgaccctgtttgcaaagtgctgtaagccataattgccctaaggcaccgcatcccaatacggtaattttcattgttcctcctcacccgcaaccactccgggtgttcaataaggctatcccttaattgtgcatgctgttgcgactatgcacaattaagggatacgtcctggtgcaggactgtcggttatttaactttgcgggtattatgcttcgcatcaaaaatgaagggagaggaaaagatgccatctttcgatattgtctctgaagttgatcttcaggaagcacgtaacgcggtcgataacgcgagccgcgaagtggagtcccgttttgacttccgtaacgttgaagccagttttgagctgaacgacgccagcaaaaccatcaaagtgttgagcgagtccgatttccaggtcaatcagttgctggatattctgcgtgccaagctgctgaagcgcggcattgaaggcagtagcctggatgtaccggagaatatcgttcatagcggtaaaacctggtttgtggaagcgaaactgaaacagggcattgagagcgcgacccagaagaaaatcgtcaagatgatcaaagacagcaaactgaaagtgcaggcgcaaattcagggcgatgaaatccgcgtaacgggcaaatctcgtgatgatttgcaggctgtcatggcgatggtacgtggtggcgatctcggtcagccgttccagttcaaaaacttccgcgattaatcgcgactatgtgcgttttgttcatgtcagatgcggcatgaacgcctgattcggcctacaaaggtttgtaattcagaaactttgtaggcctgataagcgtagcgcagcaggcaattcgccgcgttttttatgcctgacgaattgcctgttctatctcaaagcgattcgtcactttgctgtcgattttcacataagcactatgttcttcttctgcaatcaacacttctttgatgccttcagtttctagcaaacgcacttttaacgcctcgtttgcggcaatgttcgccgggatttcaatgcgcaaactgctgacatacggcggttctttcatggtactggcgactgtcagccacactgcggccagcattgcgccagcgagaaataccccctgaccgtcaaacatgccgttaatccagccgcccaggctaccgccaatcgccacgccaagaaactggctggtggagtaaacacccatcgccgtacctttgtaacctgctgggctctctttactgataagactgggcaggagggcttccatcaaattaaacgccacaaagaaaagctgcacgccgaccaccagttgccagaactgcgtttgcgcgttccacaacacaatttccgcaaccacgatcaacccgacgcagaagacaaagacttgcttcattttgcgcttaacttcagcgtagataatgaaaggcacgacgctgccaaaggcgattagcattgtcgccagatagaccttccagtgttcagccgccgggaaccctgcatcagccagttgtccgggcagggcaacaaacgtgctcatcagcaaaatatgcagacacataatgccaaagttgagtttcagcagccgcggttccgccagcactttactgaaactgcctttcaccattccggactcacgattaagtacgtgagtgctactgttgggcacaacccaaatggtcaacgcaatgccggtcgttgccagaatagcgatcatccagaacagcgcgtgcagcccaagtttgtgagtgatgatcgggccaagcaccatcgcaatggcaaaggtaatgccaaagctcacgccgataaacgccatcgctttggtgcggttttgttcgcgcgtgagatcggaaagcagcgccataacggcggcggcaattgctccagagccttgtagcgcccggcccagaataattccccagatggagtcggaaagcgcagcgataacgctaccggcggcaaacaccgccagcccaccgacaattaatggtttgcgaccaatgcggtcggaaagcaggccaaacggaatctgaaaaacggcctgagtcagaccataaataccaatggcaataccgattaatgcttcgctggcaccttgcagagccatgccgtacgtggtcagaaccggcagaaccataaacatgcccagcatgcgcaagctgaatacggtccctaaaccccaggtcgcgcgcctctcacctggcgtcattttataatcgttcattaccacctctgttttaaattcgcgactagtgtaaagcggcaaacgaatggggtaaacatgcggattttttagtaaatatttcgagagggatatgtttctaatgctaagaaaaaaggtgccgtagcacctttttaatagagaggttttgttaccacacagcagccagcagcgtatggctgtccggtaccataaaatcaacggacatcatcacgctgagggcagtgatggcgatgatagagaagccgaacagcttgcgcgcccagattctgtcatcagcaactttataaccgcgcagagccatacctaaccaccagacgctaaccgccgcggcgaccaccagatatttatacccagcgtaaccgccaagagagagcatcagcgtggcaacggcaaaggcgatgatatacagcgtgatgtgattcttcgccacgctaatgccttttaccactggcaataccggaatgtttgccgcctggtaatccttaaagcggaaaatggcgatggcataggagtgaggcatctgccacaggctgaagatagccagcaggatcgctgcgccgctatcgaactcaccggttaccgcacagtagccgatcaccggcggcgcagcgccggagaggctaccaatcaacgtgccgtagacagagtggcgtttcatgtacaggctataaacgccgacataaaccacaaagcccatcacccccagccagcaggccagcggattcgcgccaaaccacagcagcataaagccagcaatacccagcaacgtggcgtacaccaggctgacagcaggagagatcaggcctttcaccagcacccgattcttcgtcctttccatctttctgtcgatatccctgtcgatgtagttgttaaacacacaaccgctcgccacaaccagactcaccccaaccagcgtgtagataaacaggggataatcaatgctgcccttactggccagcaggaatcccccaatcacgctgatcaggttgccaaagatgatgcctggtttcgttacttgcaggtattgcttaaacatcataaccgccgctcttagtgcatcatcatgttgtagttgaggttccacataatccagatggagcctacaaccaggatagcgatgattagcacggtgaagacaaacgccgtcatgttccagccttcatcacttttggtattcatgtgcaggaagcacaccagatgcaccagaacctgtaccactgccattgccaggattgttcccagaattacggccggagaggcagctcctgtcatcaccatccagaacggaatcaccgtcagaatgatgctcaggataaagcctgtcatgtaggtttttacgctgccatgggacgcgccgctgtgatcggtagaatgactcattacatcgcccccatcagataaacaacagtgaacacacagatccaaaccacatccaggaagtgccagaacaggctcaggcacatgatgcgggtacggttagtgctggtcaggccgcgacgggcgatttgcaccatcagcaccgccatccagataagaccagaagtgacgtgcagaccgtgcgtgccgaccagcgcaaagaacgcactcaggaagccgctgcgatccggacccatgccgttaacaatcaggtgatggaattcatagatttccatcccgataaatccggcaccaaacaaccaggtcaacgccagccaggagataacctggcttttgttgtttttgtacatggcgatagccgccatgccgtaggtgatggagctgaacaacagcaagaaagtttcaaccagaacgaacggcagttcgaaaatgtccttacctgtcgggccgcctgcggtgccgttcaccagaacggcataggtagcaaacaagatagagaacagaatgcagtcgctcatcaggtagatccaaaatccgaagattttggttccgcctgcatcgtggtgcccgtgttcgtgcgcgtgggcagtcgcgtgcgtcaaagtatcagttgccatttttcagccctgccttagtaatctcatcgaaatgctggttttccagtttttcgatttctgccaccggcacgtagtaatccacgtcctcgtcgaagcttttcacgatccaggtgatgatcatgcctgcgaagccaacaatcgccagccaccagatatgccagatcatggcgaaaccgaagatggtggagaaagctgcaatgacgatacctgcaccgctgtttttcggcatatgaatttcttcatagtggtcaggctttttatacgcttcgcctttctctttcatttcccagaatgcatcacgttcgtgaacgtgcggcactacggcaaagttatagaacggaggcggggaagaggttgcccactccagcgtacggccaccccacgggtcgccagtcaggtcacggttctggtcgcggtcgcgaatagaaacgtacatctgaataacgaggcagagaatacccagcgcaatcagtactgcaccgctggctgcaatcatcagcatggtgtggaactgcgggtcaatctgctggctcaaacgacgggtcatgcccatgaagcccagcgcatacagtggcataaaggcaacgaagaagccgatgatccagaaccagaacgcgcgtttaccccaggtttcgttcagtttgaaaccgaacgctttaggccaccagtaggtcatccctgcgaagcagccgaagaccacgccgccgatgatcacgttatggaagtgcgcaatcaggaacaggctgttatgcagaacgaagtccgcgcccggtacggccagcagcacgccagtcatcccgcccacgctgaaggtgacgataaaaccgatggtccacagcatcgcagaatggaacacgatgcggccctgatacatggtgaacagccagttgaagatcttcaccccggtcgggatggcgataatcattgtggtgataccaaagaaggcgtttacgttcgcgcccgcacccatcgtaaagaagtggtgcagccaaacgatgaagctcagcacggtgatacagacggttgcccataccaggctggtataaccaaacagacgtttacggctgaaggttgccgcaatttcggagaacacaccgaaaacaggcaggatcaggatgtaaacttccgggtggccccaggcccaaatcaggttgatgtacatcatcatgttgccacccatatcgttggtaaagaaatgggtgcccagatagcgatccagggtcaacaacgcgacggtaaccgtcagaattgggaaggaagcaataatcagtacgttcgcgcacagacttgcccaggtaaatactggcatcttgaacatggtcatgcccggtgcgcgcatcttcagaatggtaacgaagaagttgataccggtaagcgtcgtacctataccggatagctggagactccatatccagtaatcgacaccgactcccggactgtactctattccgcttagcggtggataggccagccagccggtctgcgcaaattcgcccacgccgagagaaacgttaaccagaatcacaccaacaacggtaaaccagaagcttaagttgttgaggaacgggaacgcaacgtcacgcgcgccgatctgcagcggaaccaccaggttcatcagaccgataacgaaaggcatcgccacgaagaagatcataatcacgccgtgcgcggtaaagatctgatcgtagtggtgaggtggcaggaagcccgcttcgcccgcgctggcaagagcctgctggctacgcatcataatggcgtcagcaaaaccacgcagcaacatcacaatcgccacgatgatatacatgataccgaggcgtttatggtcgacggaggtcagccactctttccacaggtaggtccacttaccgaagtaagtgatcaggccaacgagcgccagacctcccaaaataatgccagcgatcgtaaccatgacgataggttcatggaacgggactgcatcaagacttaattttccgaacatctttattcttcctcaacccctttaatgggcggattccgcgtggctcatgtccatgccttccataccttcgtgtgcgctgtgctcaccttctggctgggtcatgtccatgctcttaccgtgagccataaacttgttaattacatcggcaaacaagtctggtttcacgttggagaaatattccacctggttgtattcgctaggcgcggccagtttttcgaacgcagccatgtcagacatggtgttcgggctctgcttcgcttttgcgacccactggtcgaatgcggcgcgatccggtgttgcaatagctttgaacttcatgccactgaagcccgggccgctgtagctggcggagataccgtcataagtgccgggttcgttggcgatcagatgcaggcgagtctgcataccggccatggcataaatctggctacccagacgcggaatgaagaaggagttcatcacggagttggaggtcactttgaagtacaccggagtgttcgccgggaaagcgatttcattcacggtagcaatgccctgttccgggtagatgaagaaccatttccagtccatggaaaccacttcgatggtaatgggcttctcgtcgtgtgccagcggcttgctaggctcaagagcgtgagtggttttccaggtcagtactgcaaggaagatgatgattaagataggtaccgtccagaccacagcttccactttattggagtgactccagttcgggctgtacttagcatctttattgctcgcacggtacttccaggcgaaaccaacagccatcaagattgcgggaataacgacaatcaacatcaggccaaatgccgtcagtatcagactacgttgctccagaccaatctgtcctttgggatctaacagcgcagaattacagccactgagcaatacagtgcctgcaaataaactcaaccatcccaaacttttattgtatttcctgagtctcatttaacgacctcaattccacgggatctggtggcgtttaaagtgtgtgggcattttacgggaaggttacattactgtaaacatgattaaattcctgttacttggatttggctgccaggtcacatatgttgcaaaacatatcaggttgattttaagaagctgttgcaaaagggcgttataacaaaaggggagtgctgaaggagtctgggcgggcaattggtataaccaatgtgaaataaaacaattatttaacaaataattatcattagagtgacaactgggtgatgagaaaataaagactcattagctgaatcgtgtaagaaaaatagaatttataaatggcgccaataatttccaaacgctaagccgcacaaaagaacaaatattaataagcgatactgatgtttatttagccgtaataattacggcgagtgattactacagctaaataatatttacagattacgtcagatgcgtttttcgtagcgccagataatccagcaaaccaccaagcacgacgccagaaagggcgactaaaaccccgacttccagcagagcaggcaggaaagagaagtgcgtcaaatccagcgcgtccatcgtcaatagcagtaaccacacggccaacaggctgacgcccgccgccagtgtccacatggcaaaggcataacctgccggatatgcggtacgggagataaagttgtcatttactcgtgtatattcaagcgtctggcggcaaaccagcagcaaaataagccctggtacggcagcggcgacggagaatagatagaatgtgctccagccgtgtgcttcaacaaaccaacccgccacggggccgacataaactcgccctacagcagaaagcgcactgagcagggcaaattgagtagcggaaaaactcttattacatagcgtcattaacagcgcgacaaaggcacttgtgcccatcccgccacagaggttttcgaaaaagacggctgcgcccatgctgtagagatgcttatcagtaatgctcagcagccagtaaccggcgttagacgcaccttgtaaaatgccgaaaatcagcagtgcccggaacagactcaggcgctgcatcaaaatcccaccgtacaatgcgccaacaatggtcgctagtaagccaagcgttttgttaaccacgcctacttcacccgcatcaaacccgacgccgcgaatcaaaaacgtggttgtcaggctcatggcgaatgcgtcgcccagcttatacagcacgataagaagcaaaataagccaggcattattgcgaccaaagaaatctcgcagaggtgcaacaaccgcttgttccagcgttttgggcacaggaatggtgtcggttggttctggtgcaagcaacgtcgcgataatacaggggatcaacagtgccgccattaaccagtacatgccctgccagcccagccatttatctgccagccacagggctaggccgccggaaaccagcatccctaaacggtaacccagcacgctgattgccgcgcccgcaccacgttcttctgccggaagcacatcggttttccacgcatcgaagactatatcctgggaagcagagcaaaaagcgatcaccactgccagcgccgccatccagcggagttgggtgcctggttcgagaaaacccatcgccgcaatggcgactaataacaggatttgcgtggcgagcagccaaccgcgccgccgcccaaaaaatggaggcgtgtagcggtccatcagcggactccagaggaatttaaaaacgtaagcctggcctaccagagagaagaaaccaatggttttgagatcgatattctcgaccgtcatccaggcctgtaaggtaccggatgtcagggcgagcggtagcccggaagcaaaacccaggatcagcaatatggcactacgcggctgttgaaaaatacgtaaatattgactggacatgggcgtctacaggcccggcttgcaccgggccagagggcagaaattaacgcgcgttctgcttgatgaattcgtggatgctggtgtcctgagacatatcagcgatggtatcggtcagcacactgttaaccgcatcggcgatatttttgttggaggcctggaacgcaccttcaacgttgtagctggcacgatagtttttggtcattttgttgccattctgcgcggtagcgatgatggcgatatccgctttggtcgcgatgttgtagcgcacgttgccctgggacacgtcagcatacagttggctaacgatgatttgcagattaaccgggccattcggaccaaccatgtaaccacgcgcggtcatctgtttttccagcacttcttgcagcaggaaacgcagatcgcgggaggcggtcagggtaacgatttgattatcgcgggtgacttttgccagcgcctgatcggtacgctgatcggcaccattaatgcttacggtgacgcccatcaggcttggatcctgctgtggcagtgtaatcgtcggggaaacttcaatagttgttggcggttttgcgcatcctgcaagcataaacagagcaactaacgggaagaggatttttttgaacatgttcgggctctcagagactcttaagcgtgtttggtaaaaattcccgccatcataacattgccaacggcgaggggaagtgggtaaggcatgtaaattcatcatgttgacgaaataatcgcccctggtaaaagaaacactgatgcgaggcctgtgtttcaatctttaaatcagtaaacttcatacgcttgacggaaaaaccaggacgaaacctaaatatttgttgttaagctgcaatggaaacggtaaaagcggctagtatttaaagggatggatgacatctcagcgttgtcggaggagatatttcatgatgatacgtgagcggatagaagaaaaattaagggcggcgttccaacccgtattcctcgaagtagtggatgaaagctatcgtcacaatgtcccagccggctctgaaagccattttaaagttgtgctggtcagcgatcgttttacgggtgaacgttttctgaatcgtcatcgaatgatttacagtactttagcggaggaactctctactaccgttcatgcgctggctctgcatacttacactattaaggagtgggaagggttgcaggacaccgtctttgcctctcctccctgtcgtggagcaggaagcatcgcgtaaaaacgcatttgcaactgtcggcgcttttccagtatgttgctaaagattttatgaaaaacggcctgcgggccgttttgttttgtctggattttgcgctttttgcccagcattcagacgaaaattgcccgggaattgtgaaaaaatacgcgacagcgcgcaataaccgttctcgactcataaaagtgatgccgctataatgccgcgtcctatttgaatgctttcgggatgattctggtaacagggaatgtgattgattataagaacatcccggttccgcgaagccaacaacctgtgcttgcggggtaagagttgaccgagcactgtgattttttgaggtaacaagatgcaagttagtgttgaaaccactcaaggccttggccgccgtgtaacgattactatcgctgctgacagcatcgagaccgctgttaaaagcgagctggtcaacgttgcgaaaaaagtacgtattgacggcttccgcaaaggcaaagtgccaatgaatatcgttgctcagcgttatggcgcgtctgtacgccaggacgttctgggtgacctgatgagccgtaacttcattgacgccatcattaaagaaaaaatcaatccggctggcgcaccgacttatgttccgggcgaatacaagctgggtgaagacttcacttactctgtagagtttgaagtttatccggaagttgaactgcagggtctggaagcgatcgaagttgaaaaaccgatcgttgaagtgaccgacgctgacgttgacggcatgctggatactctgcgtaaacagcaggcgacctggaaagaaaaagacggcgctgttgaagcagaagaccgcgtaaccatcgacttcaccggttctgtagacggcgaagagttcgaaggcggtaaagcgtctgatttcgtactggcgatgggccagggtcgtatgatcccgggctttgaagacggtatcaaaggccacaaagctggcgaagagttcaccatcgacgtgaccttcccggaagaataccacgcagaaaacctgaaaggtaaagcagcgaaattcgctatcaacctgaagaaagttgaagagcgtgaactgccggaactgactgcagaattcatcaaacgtttcggcgttgaagatggttccgtagaaggtctgcgcgctgaagtgcgtaaaaacatggagcgcgagctgaagagcgccatccgtaaccgcgttaagtctcaggcgatcgaaggtctggtaaaagctaacgacatcgacgtaccggctgcgctgatcgacagcgaaatcgacgttctgcgtcgccaggctgcacagcgtttcggtggcaacgaaaaacaagctctggaactgccgcgcgaactgttcgaagaacaggctaaacgccgcgtagttgttggcctgctgctgggcgaagttatccgcaccaacgagctgaaagctgacgaagagcgcgtgaaaggcctgatcgaagagatggcttctgcgtacgaagatccgaaagaagttatcgagttctacagcaaaaacaaagaactgatggacaacatgcgcaatgttgccctggaagaacaggctgttgaagctgtactggcgaaagcgaaagtgactgaaaaagaaaccactttcaacgagctgatgaaccagcaggcgtaatttacgcagcataacgcgctaaattcgcacaaaggcccgtcaccgccaggtggtgggcttttttttgtcatgaattttgcatggaaccgtgcgaaaagcctctttcggtgttagcgtaacaacaaaagattgttatgcttgaaatatggtgatgccgtacccataacacagggactagctgataatccgtccataaggttacaatcggtacagcaggttttttcaattttatccaggagacggaaatgagttacagcggcgaacgagataactttgcaccccatatggcgctggtgccgatggtcattgaacagaccagtcgcggtgagcgctcttttgatatctattctcgtctacttaaggaacgcgtcatttttctgactggccaggttgaagaccacatggctaacctgattgtggcgcagatgctgttcctggaagcggaaaacccagaaaaagatatctatctgtacattaactccccaggcggggtgatcactgccgggatgtctatctatgacaccatgcagtttatcaagcctgatgtcagcaccatctgtatgggccaggcggccagcatgggcgctttcttgctgaccgcaggggcaaaaggtaaacgtttttgcctgccgaatagccgcgtgatgattcaccaaccgttgggcggctaccagggccaggcgaccgatatcgaaattcatgcccgtgaaattctgaaagttaaagggcgcatgaatgaacttatggcgcttcatacgggtcaaagtttagaacagattgaacgtgataccgagcgcgatcgcttcctttccgcccctgaagcggtggaatacggtctggtcgatagcattctgacccatcgtaattgatgccagaggcgcaactgtgccgctatacttatccagggcggcacaacgctgtaagcggcttgcgcctgagaatggcatttgcgtcgtcgtgtgcggcacaaagaacaaagaagaggttttgacccatgacagataaacgcaaagatggcagtggcaaattgctgtattgctctttttgcggcaaaagccagcatgaagtgcgcaagctgattgccggtccatccgtgtatatctgcgacgaatgtgttgatttatgtaacgacatcattcgcgaagagattaaagaagttgcaccgcatcgtgaacgcagtgcgctaccgacgccgcatgaaattcgcaaccacctggacgattacgttatcggccaggaacaggcgaaaaaagtgctggcggtcgcggtatacaaccattacaaacgtctgcgcaacggcgataccagcaatggcgtcgagttgggcaaaagtaacattctgctgatcggtccgaccggttccggtaaaacgctgctggctgaaacgctggcgcgcctgctggatgttccgttcaccatggccgacgcgactacactgaccgaagccggttatgtgggtgaagacgttgaaaacatcattcagaagctgttgcagaaatgcgactacgatgtccagaaagcacagcgtggtattgtctacatcgatgaaatcgacaagatttctcgtaagagtgacaacccgtccattacccgagacgtttccggtgaaggcgtacagcaggcactgttgaaactgatcgaaggtacggtagctgctgttccaccgcaaggtgggcgtaaacatccgcagcaggaattcttgcaggttgatacctctaagatcctgtttatttgtggcggtgcgtttgccggtctggataaagtgatttcccaccgtgtagaaaccggctccggcattggttttggcgcgacggtaaaagcgaagtccgacaaagcaagcgaaggcgagctgctggcgcaggttgaaccggaagatctgatcaagtttggtcttatccctgagtttattggtcgtctgccggttgtcgcaacgttgaatgaactgagcgaagaagctctgattcagatcctcaaagagccgaaaaacgccctgaccaagcagtatcaggcgctgtttaatctggaaggcgtggatctggaattccgtgacgaggcgctggatgctatcgctaagaaagcgatggcgcgtaaaaccggtgcccgtggcctgcgttccatcgtagaagccgcactgctcgataccatgtacgatctgccgtccatggaagacgtcgaaaaagtggttatcgacgagagcgtaattgatggtcaaagcaaaccgttgctgatttatggcaagccggaagcgcaacaggcatctggtgaataattaaccattcccatacaattagttaaccaaaaaggggggattttatctcccctttaatttttcctctattctcggcgttgaatgtgggggaaacatccccatatactgacgtacatgttaatagatggcgtgaagcacagtcgtgtcatctgattacctggcggaaattaaactaagagagagctctatgaatcctgagcgttctgaacgcattgaaatccccgtattgccgctgcgcgatgtggtggtttatccgcacatggtcatccccttatttgtcgggcgggaaaaatctatccgttgtctggaagcggcgatggaccatgataaaaaaattatgctggtcgcgcagaaagaagctagtacggatgagccgggtgtaaacgatcttttcaccgtcgggaccgtggcctctatattgcagatgctgaaactgcctgacggcaccgtcaaagtgctggtcgaggggttacagcgcgcgcgtatttctgcgctctctgacaatggcgaacacttttctgcgaaggcggagtatctggagagcccgaccattgatgagcgggaacaggaagtgctggtgcgtactgcaatcagccagttcgaaggctacatcaagctgaacaaaaaaatcccaccagaagtgctgacgagcctgaatagcatcgacgatccggcgcgtctggcggataccattgctgcacatatgccgctgaaactggctgacaaacagtctgttctggagatgtccgacgttaacgaacgtctggaatatctgatggcaatgatggaaagcgaaatcgatctgctgcaggttgagaaacgcattcgcaaccgcgttaaaaagcagatggagaaatcccagcgtgagtactatctgaacgagcaaatgaaagctattcagaaagaactcggtgaaatggacgacgcgccggacgaaaacgaagccctgaagcgcaaaatcgacgcggcgaagatgccgaaagaggcaaaagagaaagcggaagcagagttgcagaagctgaaaatgatgtctccgatgagcgcagaagcgaccgtagtgcgtggttatatcgactggatggtacaggtgccgtggaatgcgcgtagcaaggtcaaaaaagacctgcgtcaggcgcaggaaatccttgataccgaccattatggtctggagcgcgtgaaagatcgaatccttgagtatcttgcggttcaaagccgtgtcaacaaaatcaagggaccgatcctctgcctggtagggccgccgggggtaggtaaaacctctcttggtcagtccattgccaaagccaccgggcgtaaatatgtccgtatggcgctgggcggcgtgcgtgatgaagcggaaatccgtggtcaccgccgtacttacatcggttctatgccgggtaaactgatccagaaaatggcgaaagtgggcgtgaaaaacccgctgttcctgctcgatgagatcgacaaaatgtcttctgacatgcgtggcgatccggcctctgcactgcttgaagtgctggatccagagcagaacgtagcgttcagcgaccactacctggaagtggattacgatctcagcgacgtgatgtttgtcgcgacgagcaactccatgaacattccggcaccgctgctggatcgtatggaagtgattcgcctctccggttataccgaagatgaaaaactgaacatcgccaaacgtcacctgctgccgaagcagattgaacgtaatgcactgaaaaaaggtgagctgaccgtcgacgatagcgccattatcggcattattcgttactacacccgtgaggcgggcgtgcgtggtctggagcgtgaaatctccaaactgtgtcgcaaagcggttaagcagttactgctcgataagagtttaaaacatatcgaaattaacggcgataacctgcatgactatctcggtgttcagcgtttcgactatggtcgcgcggataacgaaaaccgtgtcggtcaggtaaccggtctggcgtggacggaagtgggcggtgacttgctgaccattgaaaccgcatgtgttccgggtaaaggcaaactgacctataccggtagcctcggcgaagtgatgcaggagtccattcaggcggcgttaacggtggttcgtgcgcgtgcggaaaaactggggatcaaccctgatttttacgaaaaacgtgacatccacgtccacgtaccggaaggtgcgacgccgaaagatggtccgagtgccggtattgctatgtgcaccgcgctggtttcttgcctgaccggtaacccggttcgtgccgatgtggcaatgaccggtgagatcactctgcgtggtcaggtactgccgatcggtggtttgaaagaaaaactcctggcagcgcatcgcggcgggattaaaacagtgctaattccgttcgaaaataaacgcgatctggaagagattcctgacaacgtaattgccgatctggacattcatcctgtgaagcgcattgaggaagttctgactctggcgctgcaaaatgaaccgtctggtatgcaggttgtgactgcaaaataatgacctcgcgcaaaatgcactaataaaaacagggctggcaggctaattcgggcttgccagcctttttttgtctcgctaagttagatggcggatcgggcttgcccttattaaggggtgttgtaaggggatggctggcctgatataactgctgcgcgttcgtaccttgaaggattcaagtgcgatataaattataaagaggaagagaagagtgaataaatctcaattgatcgacaagattgctgcaggggctgatatctctaaagctgcggctggccgtgcgttagatgctattattgcttccgtaactgaatctctgaaagaaggggatgatgtagcactggtaggttttggtacttttgccgttaaagagcgtgctgcccgtactggccgcaacccgcagaccggtaaagagatcaccatcgctgctgctaaagtaccgagcttccgtgcaggtaaagcactgaaagacgcggtaaactaagcgttgtccccagtggggatgtgacgaagttcaagggcgcatctactgatgtgccttttttatttgtattcggtgactttctgcgtcttgtgggctgacaattgcccccgtttcttgtcacaataggcctttgcgcgcatcgatacgttgcgtgaggtacacagtcatctacagcggagtgttgttacaccatgatggacagcttacgcacggctgcaaacagtctcgtgctcaagattattttcggtatcattatcgtgagcttcatattgaccggcgtgagtggttacctgattggcggaggcaataactacgccgcaaaagtgaatgaccaggaaatcagccgtgggcaattcgagaacgccttcaacagcgagcgtaatcgcatgcagcaacagctgggcgatcaatactccgagctggcagcgaacgaaggctatatgaaaaccctgcgtcaacaggtgctgaatcgtctgatcgacgaggcgctgctggatcagtacgcacgtgagctgaaactgggtatcagcgatgagcaggttaaacaggcgattttcgcgaccccagccttccaggttgacggcaaatttgataacagccgctataacggtatcctcaaccagatggggatgaccgccgatcagtacgcccaggcgctgcgtaaccagctcactacccaacagctgattaacggcgttgccggtaccgattttatgctgaaaggtgaaaccgacgagctggcggcactggtcgcgcaacaacgcgtggtgcgtgaggcgactatcgatgttaacgcgctggcggcgaagcagcctgtgaccgaacaggagattgccagctactacgaacaaaacaaaaacaatttcatgacgccggaacaattccgcgtgagttacatcaagctggatgccgcaacgatgcagcaaccggttagcgatgcggatatccagagctactacgaccagcatcaggatcaattcacccagccgcagcgtacccgctacagcatcatccagaccaaaactgaagatgaagcgaaagcggtacttgatgagctgaataaaggcggtgattttgctgcattagccaaagaaaaatctgccgatattatctctgctcgtaacggcggcgatatgggttggttagaagatgccactatcccggacgaactgaaaaatgctggtctgaaagaaaaaggccaactgtctggtgtcatcaaatctagcgtcggtttcctgattgtacgtctggacgacattcagccagcgaaagtgaaaagcttagacgaagtacgtgacgacattgcggcgaaagtgaaacacgaaaaagccctcgatgcgtactacgcgctgcagcagaaagtgagcgatgcggcaagcaacgacaccgagtctctggccggtgcagagcaagctgccggcgttaaagccactcagacgggttggttcagcaaagataacctgccggaagagttgaacttcaagccggttgccgacgctatctttaacggcggtctggtaggtgaaaacggcgcgccgggcatcaactctgacatcatcaccgtagacggcgaccgcgcattcgtgctgcgcatcagcgagcacaaaccggaagcggtgaaaccgttggcagatgttcaggaacaagttaaggcattggttcagcacaacaaagctgaacaacaggcgaaagtggatgctgagaaactgctggttgatttgaaagccggcaaaggtgcggaagctatgcaggctgccggtctgaaatttggcgagccgaaaaccttaagccgttccggtcgtgacccgattagccaggcggcgtttgcactgccactgccagcgaaagacaaaccgagctacggtatggcgaccgatatgcaaggtaatgtggttctgctggcgctggatgaagtgaaacaaggtagtatgccggaagatcagaaaaaagcgatggtgcagggtatcacccagaacaacgcacaaatcgtctttgaagctctgatgagtaacctgcgtaaagaggcgaaaatcaaaattggcgatgcgctggaacagcaataatcctgaagccgcctcgcaaaaaaatgcgttgcagctgtaacaagaaaaggtcgctttcgcggccttttccatttctgaacattgccatttgtttactgttttcactgccgttaaggtgattccactgttaacaaacaaggagaaaacagtatgaaacacggaattaaagcactgctcattaccctgtccctggcctgtgccggaatgtctcatagcgcgctggcggcagcttctgtggcgaaaccgacggcggtagaaaccaaagcggaagctcctgcagcacaaagtaaagcagcagtaccggcgaaagccagtgacgaagaaggcacccgggtcagcattaataatgccagcgcggaagagctagcccgcgcgatgaatggcgttggcctgaagaaagcgcaggcgattgtcagttatcgcgaagagtacggtccgtttaaaactgtggaggatctaaagcaggtgccggggatgggcaatagcctggtggaacgtaatctggcggtattaaccctgtaattaatttgcatagtggcaattttttgccagactgaagaggtcataccagttatgacctctgtacttataacaacaacgtaaggttattgcgctatgcaaacacaaatcaaagttcgtggatatcatctcgacgtttaccagcacgtcaacaacgcccgctaccttgaatttctcgaagaagcccgctgggatgggttggaaaatagcgacagttttcagtggatgacggcccataacatcgccttcgtcgtggtcaatatcaatattaactatcgtcgcccagcggtattaagtgacctgttaactattaccagtcagttgcagcaattaaacggtaaaagcggcatcttaagccaggtcattacactggagccggaagggcaggtggtagcggatgcgcttattacgtttgtttgtattgatcttaaaacgcagaaagcattagctctggaaggggaattgcgcgaaaagctggagcagatggttaagtaaacgttttgtggtgccggatgctcaagccgcatccggcgacacccggaataattacctcaacccggttttctgcttcatcgctgccatcaccgtcggtttatcggccagataatgattcaaaccgttggcgcgtaaattacatgccgcacaatgaccgcaaccgtcgcctttaaagccgttatagcaggtcaacgtttcgttacggactaaatccagtttgccgtaataatctgccagcgcccaggtttccgctttatcaatccacatcagcggcgtttcaaaacgaatatctttcgccatgcccaaactgacggcatggtttagtgctttcacaaactcatcgcggcaatccgggtagccggagaaatccgtttcgcagacgccagtaattacggcttctgcttttacctgatacgcatatattgccgccagcgtcaggaacaaaatattacgccctgggacaaacgtattcgggataccatcggcttcaggttcataatcaggcaccggaatgctgtcacgcgtcaggctactgaccgccagctcgttgagcagggtgacatccagcaccttatgcgcgcgtgcccccagtttcagcgccagttcgcgtgccacgtcgatttctgcgcgatgccgctgaccgtaatcgaacgtcacgcaatggacttcatcatattgttgtaatgcctgcaccagacaggtggtggaatcctgacctccactgaacacaacgacagcacgtttcatagataatcctgcttgaacaataaaagcgttatggtaacgcctgcgattaacccggaccagctattcattggcttggcgcgggaagccaggcttcggtaaattcaaaccagccgcgcggtgtcagtcgcacaccgttcacgccgggaggggcactaatgcgatagtgatagttgaacagcggcgtcagcgtcgcatctgtcattaactggctaaaaaccgctttcagggcattaaatcggttttcttcatcaggcattatttgcacggcatccagtgtgctttgtagatgtgcgtatgctggagcgtcgaaaacatgtggccacagcggatcgcagcgcagccattgctccagagtatattccggtgcttcgccaattaatctgtcgcccatcatgaggtctgcgtgtgcctgtagggtcgtgtcgtcccagttttttgcgttatgaaaaataattgtgagttcacagccttccgctgccagtgtcgcctgtaggcgttctgccatggtatgaagttctatcggtaggtgataaaccagcgtcaaggttttcggtagtttgacttcatccggtacctgccaatgcggaatagtccagcctggcagtaatgcatgactggcggtgatcaggttttctccgacttctaacgtttgtaataaaccggattgatgaataatggagatcacttttcgcgcctgccagagggagagtcggggacttttgcgcaacgtcaaatagcaaaaacctaaactgatgccgctactgacctggctgacccgttgcagctcctccggtttgccgatggtgatttgcacgggatgccgacaactggttcccaaatctttttcgaaaagcggcggagttatccagtactcaaccgctttaagcagcggatgacgtaaatggtaataatcatggctttccaggcgcaccagctctgctgtgaattgtgttaagcgaaaaggacccgtgccgatcagtgggaattgcggatgcgccagatggctgcaatagctcgccagccggtgcgcaagccagtaatcagggcgatgtaaaaagaaggtcagacactgcggatgggtgacttcaatacgcttcacgctaataaataattgatccagtgctggcagttgtaacagcatcaataatcgctggtgtaagtgactggcttttactgcatcgccgttatgccagtgtagggtactacgaagataaaagtcccagcgtaacccgtcagtagaggtttcccagtgatgcgctaaatcgccaatcgggcgctgagtattattatcgaagcgggtcaggccggaaaatatctgcccggcgagatgctgctcggcacggccgggcaaaaagcctggttgtagcggttcgagcgggcgatagtagggaatacgcaacgtgggtgtatcgttttgccattgtccgcccataaacggctgtaacagagtgcgcagctcacctggggccagttgcgccagctccagcacatcttgctgctttccggtttccagtgcctgttccatcatcgcattgcgtaggctttccggcgtgaccagaaagcgtaattgtccgcgctttccgcgtccactctgcgcctgccactccagccatcccgcctcctgtgcctgacgcaacagcgtacgaacatggcgttcgctgcaaaaacagcgttcggccagttcgctgacggtgacggtttgcggctttccggcggaaggttgccacagacgttgatactggttaagacggttgagcaatcgcatataaacccggaacaatattatttaactattcactattacttccgtatatatcaggtgatactcaatcaccattaaccgtgtcacagagtggagaaagaaatggctcgtctggcagcatttgatatggatggcactttattgatgcccgaccatcatttaggtgagaaaaccctctctactttggcgcgactgcgtgaacgcgacattaccctcacttttgccacggggcgtcatgcgctggagatgcagcatattctcggggcgctaagcctggatgcgtatttgattaccggcaacggaacgcgcgtgcattctctggaaggtgaacttttacatcgtgatgatttacctgcggatgtcgcggagctggtgctgtatcagcaatgggatacccgagccagcatgcatatcttcaatgacgacggttggtttaccgggaaagagatccctgcgttgttgcaggcatttgtctatagcggttttcgttatcagataatcgatgtcaaaaaaatgccactcggcagcgtcaccaagatctgcttctgtggcgatcacgacgatcttacacgcttgcagatccagctatacgaagcattaggcgagcgtgcacatttgtgtttttccgccacggattgcctcgaagtgctgccggtgggctgcaataaaggcgctgcattgacggtgctgacccaacatttaggtttaagcttgcgcgattgcatggcctttggtgatgcgatgaacgatcgcgaaatgttagtcagcgtcggtagcggatttattatgggcaatgcgatgccgcaactgcgcgcggagctcccgcatttaccggtgattggacattgccgaaatcaggctgtctctcactatttgacgcactggctggactatccacatctaccttattcccccgaataacgagatcccttccagcaccgggcaattgcccggttttttttgcgttgaatttgtcattttgtgccgtggtgtttaaaccgcacagaataaattgtcgtgatttcacctttaaaataaaattaaaagagaaaaaaattctctgtggaagggctatgttagataaaattgaccgtaagctgctggccttactgcagcaggattgcaccctctctttgcaggcactggctgaagccgttaatctgacaaccaccccttgctggaagcgcctgaaacggctggaggacgacggtatccttatcggcaaagtcgccctgctggatccggaaaaaataggcctcggcctgaccgcttttgtgctgataaaaacgcaacatcacagcagcgaatggtattgccgctttgtcacggtggttaccgaaatgccagaagtgctggggttctggcgcatggctggtgaatacgattatctgatgcgcgtccaggttgccgacatgaaacgctacgacgagttttataagcgtctggtaaacagcgtgccggggctgagcgacgtcacttccagcttcgcgatggaacagattaaatacaccacttctttacccatcgaataaatatccagaatcaggtcaggacacaacgcgtgcgattatttgctcaattaagctggtatttccgtcgggaatggcgtcgctatctcggggctgtcgccttgcttgtcattatcgcgatgctgcaactggttccgccaaaagtggttggtattgttgtcgatggcgtgacagaacaacactttactaccgggcagatcctgatgtggatcgccaccatggtgctgattgccgttgtggtttatctcctgcgttacgtctggcgggtattgctgtttggtgcgtcttatcaactggctgttgaactgcgtgaagattattaccgtcagctaagccggcagcatcctgagttttacctgcgtcatcgcaccggtgacctcatggctcgtgcgaccaatgacgtcgatcgcgtcgtgtttgccgccggagaaggggtgctgacgctggtggatagtctggtgatgggctgcgctgtgttgattatgatgtctacgcaaattagctggcagttgaccttattttccctgttgccgatgccagtgatggcgatcatgattaagcgcaacggcgatgctttgcatgaacgctttaagctggcacaggcggcgttttccagtcttaatgaccgcacccaggaaagcctcaccagtatccgcatgatcaaagcctttggtctggaagatcgccagagcgcgttatttgccgcggatgccgaagataccggcaaaaaaaacatgcgggtggcgcgtattgatgctcgtttcgacccgaccatctatatcgcgattggtatggcgaacttgctggcgattggcggcggtagttggatggtggtgcagggcagtttaacgctgggccagctcaccagttttatgatgtatttaggtctgatgatttggccaatgctggcgctggcatggatgtttaacattgtggaacgtggtagtgctgcgtacagccgtattcgcgcgatgctggcggaagcgccggtggtgaacgatggtagcgaacccgtgccggaagggcgtggcgaactggatgtaaatattcaccagttcacgtatccgcagactgaccatcctgcgctggaaaacgtcaatttcgccctgaaacccggtcagatgctgggtatctgcgggccgactggttccggcaaaagtaccctgttgagcctcattcagcgtcatttcgacgtcagcgagggggatattcgctttcatgatattcctctgacgaagttacaactcgatagctggcgtagccgcctggcggtagttagccagacgccattccttttttctgacactgtggcgaataacatcgcgctgggttgcccgaatgccacccagcaagagattgagcatgtcgcgcggttagccagcgtacatgacgatattttgcgtctaccgcaaggttacgatacagaggtgggcgagcgcggtgtgatgctttccggcgggcaaaaacagcgtatctccattgctcgtgcgttattagtcaacgcggaaatcctcatccttgatgatgcgcttagcgcggtggacggacgcactgagcaccagatcctgcataacctgcgtcagtgggggcagggaagaacggtaatcatcagtgcccatcgcctttctgcactgacggaagccagtgaaattattgtgatgcagcacggacatatcgcccagcgtggcaatcatgatgtgctggcacaacaaagcggctggtatcgcgatatgtatcgctatcaacaactggaggcggcgctcgacgacgctccggaaaatcgcgaggaggccgtcgatgcgtaactaaaaatcgcgaggaggccgtcgatgcgtagttttagccaactgtggccgactctcaagcgcctgttagcgtacggtagcccgtggcgtaaaccgctggggattgcggtcctgatgatgtgggttgcggcggcggcagaagtcagtgggccgctgcttatcagctattttatcgacaatatggtagcgaaaaataacctgccgttgaaagtggttgcagggctggctgcggcgtatgttgggctgcaactgtttgccgccgggctacattacgcgcagagcctgctgtttaatcgggcggcagtaggcgtagtgcaacagttgcgtaccgacgtgatggatgctgcgttacgccagccattaagcgagtttgatacccaacccgtcgggcaggtgatttcccgcgtcactaatgacactgaagtgatccgcgatctctacgttaccgtagtggcaactgtcctgcgcagtgccgcgctggtgggcgcgatgctggtggcgatgttcagcctcgactggcgaatggcactggtggcgataatgattttcccggtggtgctggtggtaatggtgatataccagcgttacagcacgccgattgtccgtcgtgtgcgcgcctatttggcggatatcaacgacggctttaacgaaatcatcaatggcatgagcgttatccagcagtttcgtcagcaggcgcgatttggcgaacgtatgggggaggccagtcgtagtcactatatggcgaggatgcaaaccctgcgcctcgacggttttctgctgcgtccgctgctgagtctgtttagtagcctcattctttgtggcttgttgatgctgtttggcttctccgccagcggcaccattgaagtgggcgtgctgtatgcgtttatcagctatcttgggcgacttaacgaaccattaatcgaactgaccacgcaacaggcgatgctgcaacaggctgttgttgctggtgagcgcgtgtttgaactgatggacggaccgcgccagcaatatggcaatgatgatcgcccgttacagagtggcaccatcgaagtcgataacgtgagttttgcttatcgcgatgacaatctggtgctaaagaacattaatctctctgtgcctagccgcaattttgtggcgctggtcgggcataccggcagtggcaaaagcaccctcgccagtttattgatgggctattacccgctaacggaaggtgagattcgccttgatggtcgtccattaagtagcctaagtcacagcgcgctgcgccagggcgtggcaatggtgcagcaagatccggtggtgctggcggataccttcctcgccaacgtgacgctggggcgggatatctccgaagaacgcgtctggcaggcgctggaaaccgtgcaactggcggagctggcgcgtagcatgagcgacggtatttacacgccgctgggcgagcaggggaataatctcagtgttgggcaaaagcaactgctggcactggcgcgcgtgctggtcgagacgccgcaaatcctgatccttgatgaggcaaccgccagcattgactccggtactgaacaggcgattcaacatgctctggcggcggtgcgtgaacataccacgctggtagtgattgctcaccgcttaagcaccattgttgatgccgacaccattctggtgcttcatcgtgggcaagccgtggagcagggcactcaccagcaactgctggcggcccagggacgctactggcagatgtatcaactgcaacttgcgggcgaagagctggcagccagcgtgcgtgaagaggaaagtttgagcgcctgaatagcgcaatatttcatcgttggtgcaaaaatgtaacgcactgtgcactgtcatagtgcgttttcattttcaaacttcttaacttcctgctctctttctcgtttttcatttctggcacaccgcttgcaataccttcttcgtgtagcagaaccattaccgaattctgaccggaggggatctatgaagctggtgaccgtgataatcaaaccattcaagctggaagacgttcgtgaagcgttatcttccattggtattcagggcctgaccgtcaccgaagtgaaaggtttcgggcgtcagaaagggcatgccgagctgtaccggggggcggaatacagcgtcaatttcctgccaaaagtaaaaattgatgtggcgattgctgatgaccaactcgatgaagtgatcgatatcgtcagtaaggcggcttacaccggaaaaattggcgacggcaaaatcttcgtcgctgaattgcaacgcgtcattcgtattcgtaccggcgaagccgacgaagcggcgctgtaatctctggcacacagcaacaggaacgaaaaatgaagatagcgacgataaaaactgggcttgctagtctggcgatgcttccgggactggtaatggctgcacctgcggtggccgataaagccgacaatgcgtttatgatgatttgtactgcgctggtgctgtttatgactattccggggattgccctgttttacggtgggttgattcgcggcaaaaacgtgctgagcatgctgacgcaggtgacggtgacatttgcactggtctgtattctctgggtggtttacggttacagcctggcgtttggtgagggcaacaacttcttcggcaacattaactggttgatgctgaaaaacatcgaactgacggcggtgatgggcagcatttatcagtatatccacgtggcgtttcagggaagctttgcctgcattaccgtcggcttgatagttggggcgctggcggaacgaatccgcttcagtgctgtgttgattttcgtggtggtatggctgacgctctcttacattccgattgcgcatatggtgtggggcggtggtttgctggcttctcacggtgcgctggatttcgcgggtggcaccgtggtgcacattaacgccgcaatcgccggtctggtgggcgcgtatctgataggaaaacgcgtgggcttcggtaaagaggcgtttaaaccgcacaacctgccgatggtcttcaccgggactgccattctctatatcggttggtttggctttaacgccgggagtgcgggcacggcgaatgaaatcgcggcactggcatttgtgaatactgtggtcgcaacggcggcggcaattcttggctggatcttcggtgaatgggcgctgcgtggtaagcctagtctgctgggggcgtgttctggcgcgattgccggtctggtcggcgtgacgccagcctgcggctacattggggttggcggcgcgttgattatcggcgtggtagctggtctggcgggcttgtggggcgttaccatgctcaaacgcttgctgcgggtggatgatccctgcgatgtcttcggtgtgcacggcgtttgtggcattgtcggctgtatcatgaccgggatttttgccgccagcagcctgggcggcgtgggcttcgctgaaggtgtgacgatgggccatcagttgctggtacagctggaaagcatcgccattacgatcgtctggtccggtgttgtggcatttatcggctacaaattggcggatctgacggttggtctgcgtgtaccggaagagcaggagcgagaagggctggatgtcaacagccacggcgagaatgcctataacgcgtaacaagcactgcaaaaaacagccggacggttttcacctccggctatttttttaattgtgattacgcatcaccccttcctgaacggtgctggcaaccagtacgccgtcttgggtataaaactcaccgcgcacaaagccacgtgcgctggacgcgctggtgctctccacgctatacagcagccattcattcaaattaaacgggcgatggaaccacatggaatggtcaatggtggcaatctgaatccccggttcgagaaaaccgatgccgtgcggctgtagagctaccggcaggaagttaagatcagaagcgtaaccgagcagatactgatgaacgcgcaggtcatccggcacgctaccatttgcgcggatccacacctgacgatgtggttctgcgacgtgacctttcagtgggttatgaaactccaccggacggacttccagcggacgatcgcagatgaatttatctttcagcactggcggcagcaggtgcgccaggctttgggcgatttgcgtttcgctagggaggccatcaggcgctggcgcggacggcattgttttttgatgttcgaaacccgcttctggtgcctggaaagaggcagtcatataaaaaatcggtttgccgttttgaatagcagcaacccggcgggcgctgaagctgttaccgtcacgcagcgtttcgacatcataaataatcggcttcttactatcgccagggcgaagaaagtagctgtgaaagctatgtaccagccgctcttcagggacggtctcttttgcagcatacaaggcctgacccacgacctggccgccaaacacctggcgtaaacctaaatcttcactctggccgcgaaagagtccttcctcaattttttccagatttaacaatgtcagtaaattttttagcgcctgactcatataactctccagtaacaaagctgccgcagcaagccaaagtgagttgagtataacgcaaatttgctactggtccgatgggtgcaatggtctgaattacgggctaattacaggcagaaatgcgtgatgtgtgccacacttgttgacgttactattttgttaaccactcttccggcgaggaaagttagcccgctggtgcattgataataaggagaaatgaatgaaactcgtgcacatggccagtggtttagcggttgcgattgcgttggcggcttgcgcagataaaagcgcggatattcagacgccagcaccggctgcaaatacgtctattagtgcaacacaacaaccagctatccagcaaccgaatgtctccggtaccgtctggatccgtcagaaagtcgcactgccgcctgatgctgtgctgaccgtgacactttctgacgcgagcttagccgatgcaccgagtaaagtgctggcgcagaaagcggtgcgtactgaaggtaaacagagtccattcagctttgttctgagttttaacccggcagatgttcagccgaacgcgcgtattctgttgagtgcggcgattaccgtgaatgacaaactggtatttatcaccgataccgttcagccggtgatcaaccagggcggaactaaagccgacctgacattggtgccggtacagcaaaccgccgtgccggttcaggccagcggtggcgcaacgactaccgtacctagcactagtccaactcaggtgaatccgtctagcgcagttccagctcctacgcaatattaagcgacgttaaccctctccgcccggagagggttagtagttccagcgataacgctgcaagtcgatttgcccgcttccgcttaccatcacaccttctgccagtaatgcctgtcgctgacgctgtaaatccggtccggttaggctaattgtgccgtggcgattaaccacccggtgccagggtaaggtgctgccttcagggagacgctttaacacaccgcccacctggcgcgcggcgcgggggcttcccgccagtttcgccacatcaccgtaagtggtgacatagccttcgggaatagcggcgacgatttgccagacgcgttggggaaaactatcttctttttccatcttttcttcctgaggtaatttttcagcataatctggaaaaacgccgctgtgaagtcgcattgcgcaagaaaccagcatctggcacgcgatgggttgcaattagccggggcagcagtgataatgcgcctgcgcgttggttctcaacgctctcaatgggggctctgttggttctcccgcaacgctactctgtttaccaggtcaggtccggaaggaagcagccaaggcagatgacgcgtgtgccgggatgtagctggcagggcccccacccatttctgcctcccaccgtttcgtcaaaaaatcccaacatggctaaactttaaccacaactgacgtcgcaagaattgtctggctgcgcagtacgcttcggaggtatgtctgatgaagtatgttgatggttttgtggttgccgttcctgccgataaaaaggatgcctatcgggaaatggccgctaaggctgcgccattgtttaaagagtttggcgcgcttcgtattgtcgaatgctgggccagcgatgtaccggatggcaaagtgaccgattttcgtatggcggtgaaagcggaagagaatgaagaggttgtctttagctggattgaataccctagtaaagaggtccgcgacgctgctaatcaaaagatgatgagcgacccacggatgaaagagttcggcgagtccatgccgtttgacggcaagcgaatgatctatggcggattcgagagtatcatcgacgaataagtagcgtgacgggctgtgcggcgtgccgtcagcccaaaaattcacaaatgttgctcggcccagcgtaagaaatcttctttcggtaatgccttgctgtagagccagccctgaccgtagtgcacgccatgctggcgtaaccactcttcttgtttactggtttcgattccctccgctaccattttcagtttcagtgtttttgccatttcgatgatatgcggcgtgacatttttatattccagcgcatcaacgaaagatttatcgatcttcagaatgtcgacatccagatcctgtaaataacttaaactactataccccgtaccaaaatcatcaagataaatttcatggcccgcctcccggtagcgagaaattatcggggcgctggttttcggatcggcaaactcgcgttcagtgagttcaagcgcgatctgtctgggattaacctgatagtgattgatcatgtcacgcagcaattgcgggattttttcgctggtgagcacgggggattcaagattgatgctaatatgctgctgtggatgctgacgcagccagtcgcccatatcttcaaagacgcttcttataatcagtagcgtcaatggctcagaaaggcccgtttgctgtgccagcggaataaaactatctggactcaaccaactaccgtctgtctgcggccagcgcgccagtgcctcagcaccgacaattttgccattggctaaggagacaatcggctgatagtgcacgcaaatatcacgattttcgatagcatcctgcagccgatgatgcggactctgaatacggcgcaaaatacgcagcacaaacatcgctgccagcaggccaatcaccaacccgagcggtaaccaaataaagacttgccgatgccagcctttctgcaacattttcgtactagcccatgtgatgatgctaatattcatctccggtaagggcaggatatcgtaaatgattccattattttcgatatgctcaccgggtgttttttgtagcctggtaataattccctgagcaatttcatcgctgctggttatgacaacgttatgggcattgccaataatggcggcatcaatttgccaactgctatagggaatgacatcaataaaggaagcggggtcgatcatgacgacataatgtgccgttcccatggcgaccatgtaacggataatgcctaaatcgttatggcttgttaaccagacacgataaccatctttgctaattttacctggctcggggaaggtatcgggcggactttcatgctccagagagctacactggggaacgttgttatcgatataagccacttcctgaatatagcgataactgtaagatacccgacgcatttccatgagatgggcttcgctacaggcagcgccttgccatctttccagctcctgcagcgcatctttcccttgtgtcgccaccttattggctcgaatagcgacgcgggaggaataggtatccagctcttcaataaagcttgtttctacctgctgatgggccagccagatgcttaagccgacaggcagcaatacactaagaatcagtactccgctaataaggccgaccagatgtcgtgttctcaccagcatatccttattaacacagtgtagggaaagtatatctgattgtggaaaaaggctggctggagataaggaggtagagctggtatttcatgaagtgatgggtggaaacgatcattgtcatttgaccaggcgcagagctttacgcctggtatgtaaccctaacttaagatgtactttcggcgcgagcgagggtaaaaatatcgtaaaaagacagttcacctttacggacgatcattttttgcagttgttccttatgaacatccgcgacacgcggagagttcaagatggcttcaaccagcgcggcaggtacaaagcgcgtgttgtaccattcgccgttatagcaaacgcggaaatccagcacgtcgatatcttcatagcggtagcgtgggtagacatcgaaaaagaagaaaccattaagcaggataaataatacaaccagtagccagacagagccactcagcgtttcggactgcaacatcaccgccagggtggcaaaaaaagcaacgtacataccgataaacagccccggatgtttacggataaaactgatactaaagcggggtttgttgtcgcgtttttcgcgggtattcagagactcaatcgtttcggtcagcaggcgttgtatttcggtcatcgtttgccttcgtggtatctgcaactttccagggaacaccctattttaacgtgggaatagtagaggggaagtaacagatctaccacaattttgcataacagttgcgaaaaaccgattacaattttttaattattctggctggattaccgcccacgacaacgttgtccgggacatcttttgtgacaactgcaccactggctaccacgacgttatcaccaatggtcacaccagggttaatgaccgcgcgtccgccaatccagacgttattaccgatggtgacgggtttccccagttcagcaccgctattacgtgctacagggtcgatgggatgtgttgccgtgtagatatgaacgcctggtgccaacatacagttatcaccgatgcgaatagggcagacatcaagcatcacgcaatcgaagttggcgaaaaaattattaccgagaaaaatgttatagccatagtcacagcgaaacgttggctcaatataagcctctgtcacctgaccgaatagatcagcgagaatttgctggcgtaatgtgtgctcttccgccagggaatgattgtatcggtgaataagctgacgagcgcgcaggcgatcgcgagataacgtctcatctgcgctgcgatacaactcaccagcaatcatcttttctttttctgtgctcattactgacctccggttgctgaaaatgcggcaacacagtaagacgaaaagtcagtgaagagaacgttcccattacatctgtgtgataaagatcacatagggtatgtcttcatggcgaaaaagtataaaattcttaataaacagccggttatagctccgaaagcgaattatttattagcgaataaatttccatacactggaagggatcttgtcgtacagtttattcatggtcaattcggcgaggcggtgatctgcggcactgtaaaataccgccagttcattatcacttaattcgtatttatttttctcgataacacgctccagcgtgtcaattgtctggcaacgacgtaaacgcattaaataatcggttttcgttaaaggtttttcggacatacttctacctatggttgtaataattttaacaagataaactcgcaggattctctttcgtcgcattgacaaaacaacggaatagtcgattaccactcttccgccatttctgaagatcctgcatattaataccataactactgaacaacataaaggtgtcatccagatattcgtcgatctgctcaatgagcttattgtcttcattatacttaattttgtaattaagtgcgaaggtcgcaatatgctcaatcagttcattcaactggaggttgatcgcgctggttgggtcgtttacccagccatgattgctttcttcaaggtttgcaaggcagtcatgatacagggtttcacagagaaacttaagctgtgcgatatcatgtcttttgggactgtattcatccataacgcgtccccttcttagcggttgaactaacggacacctttcgggatggaaaaaacttactgacctggacttgccctctcgtttgttagcttaactataagccactctttgcaggttttcatcgcattattacgaaaaattacaattaggaaggaagcgggacaggactcactttttcatactagcactaacccgcagcaggtaaaagcagtttgctcgaactattcataacatttcaggattatcgccagatgaaattggtgacactaataccaggattgctctgaatatgacgtaataaccgaggaatgaataaagaattaccgcaaataattaagaatagcctctaaatgattatggattattaaatctattagcgctacttaatataaattaactaacaatcagtattttttatgaattttatccgtggttaatactggttttcgtatgagatcctgagttggtggttcaattactccttaatgttcgtaggttatgcataaaaaaggccgcttacgcggccttagtgattacacgttgtatcaatgatgatcgacagtatggctgtgctcgatatcttcattcttgcggctaaagcggcggcgaaccaccacaaagaataccggaacgaagaagattgccagtaccgttgcggtcaccatcccgcccattacaccggtacctactgcgttctgcgcgccggaaccagcaccagtactgataaccagcggcataacgccgaggataaacgccaggctggtcatcaggatcggacgtaaacgcatccgcaccgcatcaagcgtcgcttcaatcagacctttaccttctttatccatcaagtctttggcgaattcgacgataaggatcgcgttcttcgcgctcaacccaatggttgtgagcaggcctacctggaagtaaacgtcattggtcaggccacggaaggtggcagccagcaacgcaccgataacccccagcggaacgaccagcataacggagaacggaatgctccagctctcgtacagcgccgccagacacaggaacacgacaatcaagctaatcgcgtacagactaggtgcctggttgccggagagacgttcctgataggacatccccgtccagtcatagccaacaccggtaggcagtttgctcgccagttgttccatcagctccattgcttcaccggtacttttacccggtgccgcctggcctaagatttccatggatggcaggccgttgtaacgttccagacgcgggctaccgtactcccaacgagaagaggagaacgcgctgaatggcaccatctgaccatcagcagcacgaacataccagtcgccgatatcatccggcagcatacggtatttcgcttcactcatgacataaactttcttcacacgaccgcggtcgataaagtcgttcacatagctgccgccccatgcagcgcccagagtggtgttaatgtcgttgatagaaacacccagcgcctgcgctttttcctggtcgatatcaatcttaaactgcggggtatcttccagaccgtttggacgtacgctggtcaacatatcagggtgcttcgctgcttctgcaagcaactggttacgcgcctgagtcagtttttcgtgaccaaggccagcctggtcaatcagctcaaagtcaaagccggttgcagtacccagttccacgattgcgggcaggttaaaggcgaaaaccatcgcatctttgatttggctgaaagcgcgtgttgcacgcatggtaatcgcttcaactttgttttcttcgcccggacgatcggcccagtccttcaaggaaacgaacgcaataccggtattctgaccacgtcccgcaaagccgaagccgttaacggcgaacacgctctcaacgttgttcttttctttggtcagatagtaatgcgttacctcattgagcactttctgtgtacgttcctgcgttgcacctgctggcagctgaaccatggtcataaacacgccctggtcctcatctggcaagaaggagcttggcagacgcacgaacagataggccatgccgaccacgatgatcagatacagcaccaggtaacgccccgtactgcgcagaataccgcctacgctgtcggtgtagtggtgcgtgctcttctcgaacatgcggttaaaccagccgaagaagccttttttaccttccccgtgatcgcctttggcaatcggtttcagcatggtggcacaaagagctggagtcaggatcaacgccaccagtacgctcagcgccattgcactaacaatggtaatagagaactgacgatagatagcaccagtagaaccgccaaagaaggccatcggtacgaataccgcgctcagtaccatcgcgataccgaccagagcgccctgaatctgccccatgctcttacgggtagcttcttttggcggcaaaccttcttccgccataacacgctcaacgttttctaccacaacgatggcgtcatccaccaacaggccgatggcgagcaccatcccgaacattgttagcgtgtttatgctgaagccaaaggcggcaaggacggcaaaggtcccgagcaataccaccggtacggcaatggtcggaatcaacgtcgcgcggaagttctgcaggaacagatacataaccaggaacacgaggatgatcgcttcgaccagcgttttaaccacttcgtgaatagagattttcacgaacggcgtggtgtcgtatgggtaaacaattttcagaccgctcgggaagaacggttccatcttcgccagttcagcacggattgccgcagcggtatccagcgcgtttgcaccggtcgccagcttgatccccagaccggaagccggttggccgttaaactctgcgatgatgtcgtagttctcaccacccagctcaatcttcgcgacgtcacgcagcagcacgcgggaaccatcctgattcactttcagcaggattttgccgaactcttcagtagaggtcagacgcgtctgagcaataatagaggcgttaagctgttggcctttcaccggcggcgtaccaccgagctgacccgccgcaacctgggcgttctgcgctttgatggcggtaatgacatcaaccggcgttagctggaatttgttcagctcattcgggttcatccagatacgcatcgcgtactgactaccgaacaactgaacatcacccacgccgctcgtacggctgatggcatctttcatattcgccgccacgtagtcggagatatcctcctgcgtcatggtgccatcggtgttgataacgccgacaaccatcaggaagctgctggaacttttctcaacgctcaccccttgctgctgaacttcttgcggcagcaacggcatcgccagctgcagtttgttctgcacctgaacctgcgcgatatccgcatcagtaccagactcaaaggtcagggtgatctgcacggtacccgtggagtcactgttagaggacatgtacatcaggttatcgataccgttcatattctgttcgataacctgtgtcaccgtgtcctgcactgttttcgcatcagcgccggggtaggaggcggagatcgttactgccggcggtgcaatcgtaggatattgcgccaccggcagtttgaggatcgccagcccccctgccaacatgatgataatggcgatcacccacgcaaaaatcgggcgatcgataaagaaattaggcatgtcttaacggctcctgtttaagttaagacttggactgttcaggctgagcaccgcttgcggcttgctggttattatcagcggtaacttcttgtgcttttacctggacaccaggacgcactttctgcagcccacttattactacgcgatcgcctgctttcagaccttctgtcaccagccacttatcgccaatagcctggcttgcaacgatcggacgggtttccactttgtcatccgcgccaactaccagtacggtggcatcgccacgcggcgtacgggttacgccctgttgcgggactaaaatagcgtttggattaagcccttcttccagacgtgcgcgcacgaacatacccggcagcagagtgtgatccgggttcgggaagatagcgcgtagggtgatagacccagtggtctgatcaacggtaacgtcagagaattccagcgtaccgtcctgcgggaacttaatgccgtcactggtgatcagactcactttggctttgccgttctcttgtttcagcgtgccattcgccagttcctgtttcaggcgcaggaagtcgttgctggactgggtcacatcaacgtagatcggatcaagttgctgcacggttgccagcgcagtcgcctgaccgttctgtaccaatgcgccttccgtcacgttgctcttaccaatgcgaccgctaatcggagaggtgactttggtgtaagccagattgatccgcgcagtttcaacggcagctttcgccgcagttaccgcagcattcgcctgttgcgcatcagccagagcctgatcgtactcttgcttactgatgtactgagtaccgagcagtttctgataacgattcaccgtcaattgcgcgatattggctgcagcctgggctttcgccagatcacctttcgcactgtcgtatgtcgcctgataggtcgcaggatcaatctgatagagagagacacctgcttcgatgtcgctaccttctttgaaattacgcttcaggataatcccgctaacttgaggacgaacttctgcgatccggtaggcactggtgcgacccggaagctcggttgtgatctgcagaggttcagttttgactgttactacgccaacggcgggcatctgctggccaccttgttgggcctgtttgtcgtcacatcctgttagggctaagctgccactgagcatcagaacgaccgccagaggcgtaaaccctctgtttttgttcatatgtaaacctcgagtgtccgatttcaaattggtcaatggtcaaaagttaataaacccattgctgcgtttatattatcgtcgtgctatggtacatacattcacaaatgtatgtaaatctaacgcctgtaaattcacgaacatatggcacgaaaaaccaaacaagaagcgcaagaaacgcgccaacacatcctcgatgtggctctacgtcttttcagtcagcagggggtaagttccaccagcctgggcgagattgcaaaagcagctggcgttacgcgcggtgcaatctactggcattttaaagacaagagcgatttgttcagtgagatctgggaactgagtgaatccaatattggtgaactagagcttgagtatcaggcaaaattccctggcgatccactcagtgtattaagagagatattaattcatgttcttgaatccacggtgacagaagaacggcgtcgattattgatggagattatattccacaaatgcgaatttgtcggagaaatggctgttgtgcaacaggcacaacgtaatctctgtctggaaagttatgaccgtatagaacaaacgttaaaacattgtattgaagcgaaaatgttgcctgcggatttaatgacgcgtcgcgcagcaattattatgcgcggctatatttccggcctgatggaaaactggctctttgccccgcaatcttttgatcttaaaaaagaagcccgcgattacgttgccatcttactggagatgtatctcctgtgccccacgcttcgtaatcctgccactaacgaataaccctgaatctgactccaggatttttcctggacattttcgtcgttgctattctggttcactgcgtcgtgatattcttgcggtttgactttttcaggtcgttcttcaggttcagaaaccttcattcatcatgactatgttccagtattacaaacgaagtcggcattttgtttttagtgcatttattgcttttgtttttgtcttgttatgccagaacacggcgtttgcgcgggcgagtagcaatggtgatctgccgacaaaagcggacctgcaggcgcaacttgacagtctaaataaacaaaaagatctttctgctcaggacaaactggtgcagcaggatctgacagatacattagccaccctcgataaaatcgatcgcataaaagaagagacagttcagctacggcaaaaagtcgctgaagcgccggaaaaaatgcgccaggcgaccgcggcgttaacagcacttagcgatgtcgataacgacgaagaaacgcgcaaaattctgagcacgctgagcttgcgccagctggaaactcgcgttgcccaggcgctggacgatttgcaaaacgcacaaaacgatctggcgtcttataacagccagctggttagcttacagacgcagcccgaacgcgtgcaaaatgcgatgtataacgctagccagcagctgcaacaaattcgcagtcgtctggatgggactgatgtcggcgagacagccttacgtcccagccagaaagtgttaatgcaggcccagcaggcgttgctgaatgcggagattgaccagcagcgtaaaagcctggaagggaacaccgtcttgcaggataccttgcaaaagcaacgtgattacgtgacggcgaacagcgctcgtctggagcaccagttacaactgttgcaagaagcggtaaacagcaagcgcctgactttaaccgaaaaaacggcgcaggaagccgtctccccggatgaagccgcgcgtattcaggctaatccgctggtgaagcaggaactggaaattaaccagcagttaagtcagcgtctgattaccgcgactgaaaacggtaatcagttgatgcagcaaaacattaaagtcaaaaactggctggagcgggcgctgcaaagcgaacgcaatattaaagagcagattgccgtcctgaagggcagcctgctgttgtctcgtatcctttaccagcaacaacaaacgctgcccagcgcggatgaactggaaaacatgaccaaccgcatcgcggatttgcgtctcgaacagtttgaagttaaccagcagcgtgatgcactcttccagagcgatgcgttcgtcaacaaactggaagaaggtcacaccaacgaagtcaacagcgaagttcacgatgcgttattgcaagtggttgatatgcgtcgcgaattgctggatcaactcaacaaacagttgggtaaccagctgatgatggccattaacctgcaaatcaaccagcagcagttaatgagtgtgagcaaaaacctgaaatccatcctgactcagcaaatcttttgggtgaacagtaaccgtccaatggactgggactggatcaaagcgttcccgcaaagcctgaaagatgaatttaagagcatgaaaatcacggtgaactggcaaaaagcctggcccgccgtttttatcgctttcctcgctggtttgccgctgctgttgattgccgggctgatccactggcgtctgggctggctgaaagcgtatcaacaaaaactggcttccgctgtgggttccctgcgtaacgacagccagctcaacacaccaaaagcgatccttatcgacctgatccgtgcgctgccggtgtgcctgattattctcgcggttggcctgattctgttgaccatgcagctcaacatcagcgaactgctatggagcttcagcaaaaaactggcgatattctggctggtgtttggcctgtgctggaaggtactggagaaaaacggcgttgccgtacgtcacttcggcatgccggaacagcagaccagccactggcgtcggcaaattgtccgcatcagtctcgcattgctgcctatccatttctggtctgtggtggcagaactttccccgctgcatctgatggatgatgtgctggggcaagcgatgattttcttcaacctgctgctgattgccttcctggtatggccgatgtgccgcgaaagctggcgtgataaagagagccacaccatgcgactggtcaccattaccgtgctgagcataatcccgattgcgctgatggtgctgactgctacaggctacttctacactacgctgcgtctggcaggacgctggattgaaaccgtttatctggtgatcatctggaacctgctgtaccagacggtactgcgtggcttaagcgtagcggcgcggcgtatcgcctggcgtcgtgcgctggcgcgtcggcagaatctggtgaaagagggcgcagaaggtgctgaaccgccggaagaacccaccattgcactggagcaagttaaccagcagacgctgcgtattaccatgttgctgatgtttgcgctgttcggtgtcatgttctgggcaatttggtccgatttgatcaccgtgttcagctatctcgacagcatcacgctctggcattacaacggcactgaagctggcgctgcggtggtgaaaaacgtcaccatgggcagtctgttgtttgcgattatcgccagtatggtggcctgggcgttgattcgcaacctgcctggtttactggaagtgctggtgctcagccgactgaatatgcgccagggcgcgagctatgccattactaccatccttaactacatcattattgctgttggtgcgatgacggtgttcggaagcctgggcgtctcttgggataaactccagtggctggccgcagcattatccgtaggtcttggttttggtttacaagaaattttcggtaacttcgtctccggtttgatcattctattcgaacgtccggtgcgtattggcgatacggtaaccattggtagcttcagcgggacggtaagtaagatccgtattcgtgcgacaacgattaccgatttcgatcgcaaagaagtgatcatcccgaacaaagcgtttgttaccgagcgtctgatcaactggagcttgactgacactactacgcgtctggtgatccgtctcggcgtggcctatggctccgatctggaaaaagtgcgtaaagtgttactgaaggcggcgactgagcacccaagggtgatgcacgaaccaatgccggaagtcttctttacggcatttggtgccagcacgttggatcatgagctgcgtctgtatgtgcgtgaactgcgtgaccgtagtcgtactgtcgatgagctgaaccgtactatcgatcagctgtgccgtgaaaacgacatcaacattgcctttaaccagcttgaagtgcatctgcacaacgagaagggcgatgaggtgacggaagtaaaacgcgactacaaaggcgatgacccgacgccagcggtagggtaaaaacgaaagggggcaacatttagttgccccgagattgctaacaaagtgcgcgttgttcatgccggatgcggcgtgaccgccttatccggcctacgaaaccgcaagaattcaatatattgcaggagcggtgtaggcctgataagcgtagcgcatcaggcagttttgcgtttgcccgcaaccttaggggacatttagcgaccccatttatttctcacttttccgcctcatcatcgcgcgttaatttcttttcataatcacgctttacaatatccagcgcgcgcagcacggtactggcagggatctgattttcctccagcagcacaatcaaatcgacagccagtttgacatcgtcaggggcattttccagactcatattctctccattgttagcgggttaaacgcgctaacctgttttcgattttttccagcgcatggcggcagcgtgccaggcgcgcttcataggcttccacttcacgatgcagcgtttgctgttccacgagatcggtcacccgcgccagacgggctctgcgttcggcaaccatctcacgtagccgccgctcaaaatcctgatgctgaatacgtttacgctgccagcgggcaattttcggtggtgcactgtcccactcgcgcaaactccaggcggaggcttcacgcgcgatggcttccagttgtgccgccagatgttccgccagccaggccacttgcggcagctgttgctgctcaactgcatgacgaagcgcagccagattatcgcccgcctcgtcgagacaagcctgtagtgttgtcgcacgagtctgaaaaagatgcctgtcgaaacgagcacttagcgtggcgaactgactcaccggggcacaacgctgacgcagcgtagcgagctgtccttccagtttttccagcagcagggcggttttcacgataagacctcaatgaaaatgataattgttatgctaaagtagccactctgtaagctgacaacactcaatatgcaacgaatcattttaatcatcattggctggctggcggtagtgctgggtacgctgggcgtggtattaccggtattaccgacgacgccgtttatcctgctggcggcctggtgctttgcccgttcttccccgcgctttcacgcctggttgctgtaccgcagttggtttggcagctatctacgtttctggcagaaacatcatgcgatgccgcgcggcgtcaaaccgcgggcgattttgcttattttgctcacgtttgccatttctctgtggttcgtccagatgccatgggtgcgcatcatgttgctggtaattctcgcctgtttgcttttctatatgtggcgaattccggtgattgatgaaaagcaagaaaagcactgaagcacaacaatcgcagttgcaattattgcgtacagccagtacattctggcgttttcgagcacaggcgcaggcggtcaaaggttaaacaactgttacttttgatacgtttaaaacgcgccgtgagtaccaccgtaacaagcaggcatacacttatgaccgcgactgcacagcagcttgagtatctcaaaaatagcatcaaaagcattcaggactacccaaaacccggcattcttttccgcgatgtcaccagcttactggaagacccgaaagcttacgctctcagcatcgacttgctggttgagcgttacaaaaatgcgggcattaccaaagttgtcggcaccgaagcgcgtggcttcttgtttggcgctccggtagctctgggtctgggcgttggctttgtaccggtccgtaaaccgggcaaactgccgcgtgaaaccatcagtgaaacttacgacctggaatacggcaccgatcagctggagatccacgttgatgccatcaaaccgggcgacaaagttctggtggtggacgacctgctggcaaccggcggcactatcgaagcgaccgttaaactgatccgtcgtctgggtggtgaagtggctgacgctgcgttcattatcaacctgttcgatctcggcggcgaacagcgtctcgaaaaacagggcattaccagctacagccttgtcccgttcccgggccattaattatcgccagtcttgtgctgcccacgctacggacagcacaagatgtgcattcagcctcgccgttctgacggggctgtgttagcattaccccttcgtgaatccaccttccagcgtttcagagcctgccaatgagttatcaggtcttagcccgaaaatggcgcccacaaacctttgctgacgtcgtcggccaggaacatgtgctgaccgcactggcgaacggcttgagcttagggcgtattcatcatgcttatcttttttccggcacccgtggcgtcggaaaaacctctatcgcccgactgctggcgaaggggctaaactgcgaaaccggcattaccgcgacgccgtgcggcgtgtgcgataactgtcgtgaaatcgagcaggggcgctttgtcgatctgattgaaatcgacgccgccagccgcaccaaagttgaagatacccgcgacctgctggataacgtccagtacgctccggcgcgtggtcgtttcaaagtttatctgatcgacgaagtgcatatgctgagccgccacagctttaacgcactgttaaaaacccttgaagagccgccggagcacgttaagtttctgctggcgacgaccgatccacagaaattgccggtgacgattttgagtcgctgtctgcaatttcatctcaaggcgctggatgtcgagcaaattcgccatcagcttgagcacatcctcaacgaagaacatatcgctcacgagccgcgggcgctgcaattgctggcacgcgccgctgaaggcagcctgcgagatgccttaagtctgaccgaccaggcgattgccagcggtgacggccaggttagtacccaggcggtcagtgcgatgctgggtacgcttgacgacgatcaggcgctgagcctggttgaagcgatggtcgaggccaacggcgagcgcgtaatggcgctgattaatgaagccgctgcccgtggtatcgagtgggaagcgttgctggtggaaatgctcggcctgttgcatcgtattgcgatggtacaacttagccctgctgcacttggcaacgacatggccgccatcgagctgcggatgcgtgaactggcgcgcaccataccgccgacggatattcagctttactatcagacgctgttgattggtcgcaaagaattaccgtatgcgccggaccgtcgcatgggcgttgagatgacgctgctgcgcgcgctggcattccatccgcgtatgccgctgcctgagccagaagtgccacgacagtcctttgcacccgtcgcgccaacggcagtaatgacgccaacccaggtgccgccgcaaccgcaaagtgcgccgcagcaggcaccgactgtaccgctcccggaaaccaccagccaggtgctggcggcgcgccagcagttgcagcgcgtgcagggagcaaccaaagcaaaaaagagtgaaccggcagccgctacccgcgcgcggccggtgaataacgctgcgctggaaagactggctagcgtcaccgatcgcgttcaggcgcgtccggtgccaagcgcgctggaaaaagcgccagccaaaaaagaagcgtatcgctggaaggcgaccactccggtgatgcagcaaaaagaagtggtcgccacgccgaaggcgctgaaaaaagcgctggaacatgaaaaaacgccggaactggcggcgaagctagcggcagaagccattgagcgcgacccgtgggcggcacaggtgagccaacttagcctaccaaaactggtcgaacaggtggcgttaaatgcctggaaagaggagagcgacaacgcagtatgtctgcatttgcgctcctctcagcggcatttgaacaaccgcggtgcacagcaaaaactggctgaagcgttgagcatgttaaaaggtagtacggttgaactgactatcgttgaagatgataatcccgcggtgcgtacgccgctggagtggcgtcaggcgatatacgaagaaaaacttgcgcaggcgcgcgagtccattattgcggataataatattcagaccctgcgtcggttcttcgatgcggagctggatgaagaaagtatccgccccatttgatcgtaagcacagcttacgttcgtcatccttaacgtgattgagagagaaacctatgtttggtaaaggcggtctgggtaacctgatgaagcaagcccagcagatgcaagaaaaaatgcagaaaatgcaggaagagatcgcgcagctggaagtcaccggcgaatctggcgcaggtctggtaaaagtgaccatcaacggtgcacacaactgccgtcgcgtagagatcgacccgagcctgctggaagacgacaaagagatgctggaagacctggtggctgcagcattcaacgacgcagcacgtcgtattgaagaaacgcagaaagaaaaaatggcctctgtatcctccggaatgcagctgccgcctggctttaagatgccgttctgatgcaaaccagcccgctgttaacacagcttatggaagcactgcgctgtctgccgggcgttggcccgaagagcgcgcagcgtatggcgttcacgctgcttcagcgcgatcgtagcggcgggatgcgtctggcgcaggcgctcacccgggcgatgagcgaaatcggccactgcgccgattgccgcactttcaccgaacaggaagtctgtaacatctgtagcaatccgcgtcgtcaggaaaacggtcaaatctgcgtggtggagagtccggcggacatctacgccattgagcagacggggcagtttagtggtcgttattttgtgttgatggggcatctgagtccgctggacggcatcggtccggatgatatcgggcttgatcgtctggaacagcgtctggcagaggaaaaaatcactgaagtgatcctcgccaccaaccccacggttgaaggtgaagctaccgctaactacattgccgagctttgcgcgcaatatgacgtggaagccagccgaatcgctcatggcgttccggttggcggcgagctggaaatggtcgacggcaccacgttgagtcactcccttgccgggcgtcataagattcgtttttaagcaaacgagagcaggatcacctgctctcgcttgaaattattctcccttgtccccatctctcccacatcctgtttttaaccttaaaatggcattattgaggtagacctacatgaaaggacaagaaactcgtggttttcagagtgaagtgaaacagcttctgcacctgatgatccattctctctattccaataaagaaatcttcctgcgtgagcttatctctaacgcctccgatgcggcggacaagctgcgtttccgtgcgctctctaacccggacctgtacgaaggtgatggcgaactacgcgttcgtgtctctttcgataaagacaagcgtacgctgaccatctccgataacggcgtggggatgacccgcgacgaagtgattgaccatctggggactatcgctaaatccggtaccaaaagtttcctcgaatccctgggttctgaccaggcgaaagacagccagctgatcggtcagtttggtgttggtttctactctgcgtttatcgtggccgacaaagtgaccgtgcgtactcgcgcggcaggcgaaaaaccagaaaatggcgtcttctgggaaagcgctggcgaaggtgaatacaccgttgccgacatcaccaaagaagatcgtggtactgaaatcaccctgcatctgcgtgaaggcgaagacgagttcctcgatgactggcgcgtgcgttccatcatcagcaaatactccgaccatatcgcgctgccggtagagatcgaaaaacgcgaagagaaagacggcgaaaccgttatctcctgggagaaaatcaacaaagcgcaggcgctgtggactcgtaacaagagcgaaatcaccgatgaagagtacaaagagttctacaaacacatcgcccacgactttaatgatccgctgacctggagccacaaccgtgttgaaggtaagcaggagtacaccagcctgctgtacatcccgtcccaggctccgtgggatatgtggaaccgcgatcataaacacggcctgaaactgtatgttcagcgtgtgttcatcatggacgacgcagaacagttcatgccgaactatctgcgcttcgtgcgtggtctgattgactccagcgatctgccgctgaacgtttcccgtgaaatcctccaggacagcacggtaacgcgtaacctgcgcaatgcgctgaccaagcgtgtgctgcaaatgctggaaaaactggcgaaagacgacgcggaaaaataccagaccttctggcaacagtttggcctggtactgaaagaaggtccggcggaagatttcgctaaccaggaagcgatcgccaaactgctgcgttttgcttctacccataccgattcttctgcgcagaccgtatctctggaagactacgtttcccgcatgaaagaagggcaggagaaaatctactacatcaccgcagacagctatgcggcagcgaagagcagcccgcacctggaactgctgcgtaagaaaggcatcgaagttctgctgctttccgaccgcatcgatgagtggatgatgaactatctgactgagttcgacggtaaaccgttccagagcgtgtctaaagttgacgagagccttgaaaaactggctgacgaagttgatgagagcgcgaaagaagcggagaaagcactgactccgttcatcgaccgtgtgaaagccctgctcggcgagcgcgtgaaagatgtccgtctgactcaccgtctgaccgatacgccagcgatcgttagcaccgacgcggacgaaatgagcactcagatggcgaaactgttcgctgcggcgggccagaaagtgccagaagtgaaatacatcttcgaactgaacccggatcacgtactggtgaaacgtgcggcagatactgaagatgaagcgaagttcagcgagtgggtagaactgctgctggatcaggcgctgctggcagaacgcggcacgctggaagatccgaacctgtttattcgtcgtatgaaccagctgctggtttcctgatgtaatgccggatgaccttcgtgtcatccggcatttttcttttcatcatctgcactttccgcaaattatctcgccattaaccgtttcagccccaggtgcctttcttgaggcaatcgcctgttggtggtatcgtttatcgctttttcaaaaaattcgacacattttaaggggattttcgcaatgcgtatcattctgcttggcgctccgggcgcggggaaagggactcaggctcagttcatcatggagaaatatggtattccgcaaatctccactggcgatatgctgcgtgctgcggtcaaatctggctccgagctgggtaaacaagcaaaagacattatggatgctggcaaactggtcaccgacgaactggtgatcgcgctggttaaagagcgcattgctcaggaagactgccgtaatggtttcctgttggacggcttcccgcgtaccattccgcaggcagacgcgatgaaagaagcgggcatcaatgttgattacgttctggaattcgacgtaccggacgaactgatcgttgaccgtatcgtcggtcgccgcgttcatgcgccgtctggtcgtgtttatcacgttaaattcaatccgccgaaagtagaaggcaaagacgacgttaccggtgaagaactgactacccgtaaagatgatcaggaagagaccgtacgtaaacgtctggttgaataccatcagatgacagcaccgctgatcggctactactccaaagaagcagaagcgggtaataccaaatacgcgaaagttgacggcaccaagccggttgctgaagttcgcgctgatctggaaaaaatcctcggctaattcgaaagcgcgcacggacagtcccctcgccccctcggggagagggttagggtgaggggaacaggcccgcacaagcaaacttatcagcaatctcaggccggatattcattcggccttttacaaaaacctcaatctgcgctattcctttttctgatttgacctctcacagcaattagttcttcttcctcacttttccgctacaattatcaacaagttgaatcgataagaggcggtaatgcgtcagactaaaaccggtatcctgctggcaaacctgggtacgcccgatgcccccacacctgaagcggtaaaacgctatctgaaacaatttttaagcgacagacgcgtggttgataccagtcggttgttatggtggccattgctgcgcggcgtgattttgccgctgcgcagcccgcgtgtggcgaagctgtatgcctctgtctggatggaaggtggcagcccgctgatggtttacagccgccagcaacagcaggcgctggcacaacgtttaccggagatgcccgtagcgctgggaatgagctacggcagcccaagtctggaaagcgccgtagatgaactcctggcagagcatgtagatcatattgtggtgctgccgctttatccgcaattctcctgttctacggtcggtgcggtatgggatgaactggcacgcattctggcgcgcaaacgtagcattccggggataagctttatacgtgattacgccgataaccacgattacattaatgcactggcgaacagcgtacgcgcttcttttgccaaacatggcgaaccggatctgctactgctctcttatcatggcattccccagcgttatgcagatgaaggcgatgattacccgcaacgttgccgcacaacgactcgtgaactggcttccgcattggggatggcaccggaaaaagtgatgatgacctttcagagccgctttggtcgggaaccctggctgatgccttataccgacgaaacgctgaaaatgctcggagaaaaaggcgtaggtcatattcaggtgatgtgcccgggctttgctgcggattgtctggagacgctggaagagattgccgagcaaaaccgtgaggtcttcctcggtgccggcgggaaaaaatatgaatatattccggcgcttaatgccacgccggaacatatcgaaatgatggctaatcttgttgccgcgtatcgttaaagctgagcggtaaagaactgagcgccgtcgcgaagagcctcgtcggcggttttcatcatccgactataatgcaaaaaggcgtgcagcgtgcctgggtagagtttgaactcacagggctgctgatgcgccgctaacgtctggtaaagcagacggctgtcatccagcagcggatcgaactccgccccggcaataaaacagggcggaacttcgcgagtgagatcattattaaacagacagtaatacgggctctcgcggtccgcgtcgttgcttaaatatgcctcttcgtacatctgcaaatcctgttgcgttaagccatcccagacaccgcccaacagacgacgagtcacggaatcccgtaatccgtaaagcccataccacagcaaaacgcccgcaactttaccgcaatcgatctgtttatcacgcaaccacaacgcactggcgagcgccagcatggcacctgcggaatcaccggcaaagccaatgcgggacatattgatttgataatcctccgcctgctggtggaaataacaacaagcagccacaatttcctctatcgcttgcggaaaacgcgcttcaggactaagggtgtaatcaataccaatcaccgtacattggctgtagcttgccagcaggcgcatgatgcgatcgtgggtatcgagattgccgagaataaaaccgcctccatgcaaataaaatagcgtcgctgggctatctggctgcggacaaaagagacgtgtttccacctgcccatattttgttggaaccatgtaagctctggttgccatttctggagcgcccgcattccagaatcggcgctcaagcgtgtaatactgtcgttgctcagcaatcgttcccgttgcgggccagggcggtaaatccggctgaagagtattcacaacggtcttcatttcagcagaaataaggtccagaacaggtagtttgttttccggcttcatacaaaaactcctttcaaattacgtcattgtaaggaaccactgccatgaaaatgcgatcccgcctgctgatattgaaactggctgcgtctcgcgcgctcccgtcagattgtgttaacattcgccgctcagttaaccacccgtaaaaacaaccatgaaatttcccggtaaacgtaaatccaaacattacttccccgtaaacgcacgcgatccgctgcttcagcaattccagccagaaaacgaaaccagcgctgcctgggtagtgggtatcgatcaaacgctggtcgatattgaagcgaaagtggatgatgaatttattgagcgttatggattaagcgccgggcatagtctggtgattgaggatgatgtagccgaagcgctttatcaggaactaaaacagaaaaacctgattacccatcagtttgcgggtggcaccattggtaacaccatgcacaactacagcgtgctcgcggacgaccgtagcgtgctgctgggcgtcatgtgcagcaatattgaaattggcagttatgcctatcgttacctgtgtaacacttccagccgtaccgatcttaactatctacaaggcgtggatggcccgattggtcgttgctttacgctgattggcgagtccggggaacgtacctttgctatcagtccaggccacatgaaccagctgcgggctgaaagcattccggaagatgtgattgccggagccagcgcactggttctcaccagttatctggtgcgttgcaagccgggtgaacccatgccggaagcaaccatgaaagccattgagtacgcgaagaaatataacgtaccggtggtgctgacgctgggcaccaagtttgtcattgccgagaatccgcagtggtggcagcaattcctcaaagatcacgtctctatccttgcgatgaacgaagatgaagccgaagcgttgaccggagaaagcgatccgttgttggcatctgacaaggcgctggactgggtagatctggtgctgtgcaccgccgggccaatcggcttgtatatggcgggctttaccgaagacgaagcgaaacgtaaaacccagcatccgctgctgccgggcgctatagcggaattcaaccagtatgagtttagccgcgccatgcgccacaaggattgccagaatccgctgcgtgtatatagccacattgcgccgtacatgggcgggccggaaaaaatcatgaacactaatggagcgggggatggcgcattggcagcgttgctgcatgacattaccgccaacagctaccatcgtagcaacgtaccaaactccagcaaacataaattcacctggttaacttatagtagcttagcgcaggtgtgtaaatatgctaaccgtgtgagctatcaggtactgaaccagcatagtcctcgtttaacgcgcggcttgccggagcgtgaagacagcctggaagagtcttactgggatcgttaagttatcgtcggttcgtaggccagataaggcgttcacgccgcatctggcatttggctctcgatgcctgatgcgacgctggcgcgtcttatcatgcctacatatttttcatattttacatccggcaaccaccgtttaccccgtcaccacctcacccgccggtggcgtttccagcagttccagcatggtacgggcgatttcacgctcgcccatcactacctgattcgcaccacgttcggtgatatacgccacttcatcgtcataatgggcgcgggcaataatctcaatatccggatttttcgcgcgggcagatgccacaatctcacccgcttcataaccgttgggaatcgtcaggatcagccattttgcacattccagatgcgccagttgcataatttcttcgttcgccgcattgcccaatactgcgcggaccccgcgctctcgcagctcatcaacacgggttcgactcgtctcaatcaccaccagcggaatatcagaggcgagcaatttctcccccagcaggctgcctacacgaccgtaacccaccagtagcgcatggttgcaaatatccactgggatctgcttctcttcttcgattgcctcttccagcgtctgctcttccagcgtttcggtcttcgccagatatttctccagtagtgcgaacagtaccgggttgagcataatgctcaggatcgcccctgccagtaccaggttttgtccggcctgcggcagtaaattcaatgccattcccagtcccgccaggataaacgcgaactcaccaatctgcgccaggctggcggcgatggttaatgccgtacgttgggagtgaccaaacagtcgcaccaggaaaaatgcggctaagctcttaccaaacagaataatcgccagcgtcgccagcactgccagcggttgctgaatcagaattaacggatcaaacaacatcccgacggagacaaaaaacagcaccgcaaacgcgtcgcgcaatggcagcgtatcgtgggcggcacggtgactcagttcagactcgttcagtaccatcccggcaaagaacgcaccgagtgcaaaggagacatcaaacagctctaccgcaccaaaggcaacccctaacgccagcgccagcacgctcagggtaaacagctcgcgagaaccggttgccgcgctgcgtgccataatccacggcaccagacggcgacctaccagcatcataatggcgataaatgcgatcactttgccgatggtgatccccatatcgactgcaagagtggcaaagcccacatcgccctgttccatcattcctgccactgcgggcagcaacaccagcgtcagaaccattaccaggtcttccacaatcaaccaaccgatggcgatttgcccacgctgactgtcaattaattgccgttcttcaagtgcgcgcagtaacaccacggtactggcggtggaaagacataaaccgaacacgataccggtcattaagctccagcccagcacggcagagagcgccatacccagcagcgtcgccacggctatctgggcgatcgcaccgggaatggcgatggcctttaccgccatcaaatccttcaggctaaagtgcaaaccgacgccaaacatcaacagaatgacgcccagttcagccagttccggggcaagcttggtatcggcaacaaagcccggagtgaatggtcctgccagcacacccgctaacagatatcccaccagaggagaaatacgtagtttattggccagcatgccgaggataaaggcgagcacaaggccgccaacaatggtggtgataagcggggtggcgtgatgcattccgtctccttttcctggtggttattgtccatttttggccgggaaaaccaaaattacaggtaatagtttatgacaatttcattgatgatgttcatgaataattattgaattttgcagaaaaatggaattagctgcaaaaaaagcacggatcggaaaacagaaggcggtttaacagaggaaaggcttatggcgactgtaaaacgatgcagccaaagtttgcctttggctgcaatgaaatcagtctttatgccggttatcaggcaggaatatggtcaacatccccaatagtggcaggaaagcacagattttatagactaactcgatgctggtgtgatcggcgataagccccagaactgccgctcccagacctcccatgccaaaagcaaaaccgaaaaagagtccagaaaccataccgatacgtcctggaagcagctcctgagcgtagaccagaatggcagagaatgcgctagcgaggataaatccaataatcaccgttaaaacccccgtccagtgcaggctggcgtagggtaaaatcagcgtaaacggcgcaacgccgaggatagagccccaaatcacatatttccgcccaattttatcccctacaggcccgccgatcaccgtacctgccgcaacggcaaacaggaaggcaaacagatgaagctgagcattctggatagataatccgaatttttgcatcagataaaaggtgtaatagctgctgatgctcgccatatagaaatatttgctgaaaatgaggattaacagaatgctgaccgccagtacaactttattgcgcggcagtggattgataatcgtcgctttgggttttcctttattcattcggtgctgtgcgctgtaccaacggctgatttgcgccaacaccacgatcgccagcagtgccgcaagcacaaaccaggcaacgttgcctttgccataaggcgcgataatcaccgccgccagcaagggtcccagggaactgccaaagttgccgccgacctgaaagatagattgcgccaggccatgccgcccgccggaagccatacgggccacgcgagaagattccggatgaaagacgctactaccggtaccgaccagcgccgccgccagcagaactgcgccaaaactgcccgccagcgcaagcagcaccagaccgcttaaggtaaagcacatgccaattggcaagctccatggcatcggatatttatcggtccagtagccgaccactggttgcagtaggctagaggcgagctggaaggtgagggttatcatgccaatctgcataaatgtcagagaaaattcactctgaagcagcggataaatcgccagaatcaggctttggatcatgtcgttcagcagatgactgaggctgatagcacctaaaataccaaagcttgttcgggccttggtcgtactcgcagccgcgcccgccacaggctggggttgttcactcattgccataggaaagtcactttttcagggttgcgatgtaaagaatgatcttatttgtgattattaccagactaacatacctgtatgcgtcgtctgaaggaagtctcaacgccgaatacagaatttctaatctggatgcagatttatcttcaccggacgcagacttgtctatgatgtcgcgtcatactatttttcaacacgttgaaatcaggtcagggagagaagtatgaaattattgcagcggggcgtggcgttagcgctgttaaccacatttacactggcgagtgaaactgctctggcgtatgagcaggataaaacctacaaaattacagttctgcataccaatgatcatcatgggcatttttggcgcaatgaatatggcgaatatggtctggcggcgcaaaaaacgctggtggatggtatccgcaaagaggttgcggctgaaggcggtagcgtgctgctactttccggtggcgacattaacactggcgtgcccgagtctgacttacaggatgccgaacctgattttcgcggtatgaatctggtgggctatgacgcgatggcgatcggtaatcatgaatttgataatccgctcaccgtattacgccagcaggaaaagtgggccaagttcccgttgctttccgcgaatatctaccagaaaagtactggcgagcgcctgtttaaaccgtgggcgctgtttaagcgtcaggatctgaaaattgccgttattgggctgacaaccgatgacacagcaaaaattggtaacccggaatacttcactgatatcgaatttcgtaagcccgccgatgaagcgaagctggtgattcaggagctgcaacagacagaaaagccagacattattatcgcggcgacccatatggggcattacgataatggtgagcacggctctaacgcaccgggcgatgtggagatggcacgcgcgctgcctgccggaagcctggcgatgatcgtcggtggtcacagccaagatccggtctgcatggcggcagaaaacaaaaaacaggtcgattacgtgccgggtacgccatgcaaaccagatcaacaaaacggcatctggattgtgcaggcgcatgagtggggcaaatacgtgggacgggctgattttgagtttcgtaatggcgaaatgaaaatggttaactaccagctgattccggtgaacctgaagaagaaagtgacctgggaagacgggaaaagcgagcgcgtgctttacactcctgaaatcgctgaaaaccagcaaatgatcagcctgttaagtccgttccagaacaaaggcaaagcgcagctggaagtgaaaataggcgaaaccaatggtcgtctggaaggcgatcgtgacaaagtgcgttttgtacagaccaatatggggcggttgattctggcagcccaaatggatcgcactggtgccgactttgcggtgatgagcggaggcggaattcgtgattctatcgaagcaggcgatatcagctataaaaacgtgctgaaagtgcagccattcggcaatgtggtggtgtatgccgacatgaccggtaaagaggtgattgattacctgaccgccgtcgcgcagatgaagccagatagtggtgcctacccgcaatttgccaacgttagctttgtggcgaaagacggcaaactgaacgaccttaaaatcaaaggcgaaccggtcgatccggcgaaaacttaccgtatggcgacattaaacttcaatgccaccggcggtgatggatatccgcgccttgataacaaaccgggctatgtgaataccggctttattgatgccgaagtgctgaaagcgtatatccagaaaagcagcccgctggatgtgagtgtttatgaaccgaaaggtgaggtgagctggcagtaatccgaaagtgccggatgtttgcatccggcacaatgcttaatcgcggcgggcgatatcagcaaatttggcatcgaggatctttgccagatcgcctgccgccagttcgatatccagtccgcgcttgccgccggaaacataaatagtggcaaattcttgtgcgggggcgtcgataatcgttggcagacgttttttctgccccagtgggctaatccccccaaccaggtatcccgtgctacgctgcgcgaccatcggatcggccatctcaactttcttggcacccagcgcttttgctacttttttaagatccagttgacctgcgaccggcgtaacggccacggcaaggtgtttcatatcaccgttcactgccaccagcagcgttttgtagacctgatccggattcaaacctaattttttgacgacttcatcgccaaaattggtttcagccggatcgtgctcgtaggtatggatttgaaagctaatcttgtttttttcgagtaatttaactgcgggtgtcatggtaattttcctgccttaaacaaaaaaacgaagcaagcatacgcctgatggcggtccaaaaaaaagagtcatcttgcctaagagtattggcaggatggtgagattgagcgacaatcgagttacaccgtcgcttaaagtgacggcataataataaaaaaatgaaattcctctttgacgggccaatagcgatattggccatttttttagcgcaacatttgcggcaaattcccttctccatacaggtgtagtgcaccgaccgcgaccacatatcgccccggcggcatggcgcgtaatttatcccgccaggcgagatttcgctgatgcatcagcacatcgtacaggctctgactgaacgtattgggcagcgttatatcattattttgcggcggtgcattcagccaccagctcatcatttgttgcagcaaccgtgcgttggtatgccagtgggtcagcgtatcgtccagcagcgccagtcctttgtcagggagctggagcaacatggcaatctggttttcagccccttccagttcaatcacgggtttatgttgttgcttcgccgcctgcaatagctggtaatcgataccgtattctgcccgcagccccagtttttgtgcctgcgtcgcctgaagaaccatcgcgatttgccacagcggttgggtagaaaagagactgggagaaatgcccatctcctggctaatgtgctgcaggttttggagttgctcctcgctaatgcgctcttccagcgcctcgcaggcaggcaaattagcaaaaggcgtatcgctggtggaaacatccgcctcgacgatcagcgcatcggcgtttttgagctttttgagcaaacgggtgggcaggggagccatatcgtggctacccatatgaatactgccaatcagatgaaaatggcgattgccggggagggtgatatcgatggcaggccaggtgtaatgattaccgcgcagcgcggcccaaagcgtttttacccggtacaacagatccatacgacctccctttgtgaaatatcatgctagcgcgcggtgagggatggcgcaaatggagttggagacttgtttaatgtgtttgtatgattcagtatgttcttgcatcgctattcacaaggaagcaacagttaaaaaccatgaaacaggcaacaagaaaaccgacgacacccggagatattcttctctatgaatatctggaaccgctcgatttgaaaatcaatgagttagcagagttgctgcatgttcatcgtaatagcgtcagtgcactgatcaataacaatcgtaaactcactactgagatggcatttcgtctggcgaaagtttttgataccacagtcgatttttggctaaacctccaggcggcggttgatctttgggaagttgaaaacaacatgcgcacccaggaagaattgggacggattgaaacagtggctgaatatttggcacgccgtgaagagcgtgcaaaaaaggtcgcgtaaggccaaaacatcgcttcatctcgtaggccggataaggcgttcacgccgcatccggcatccgagcaccattgcctgatgcgacgcttacccgtcttatcaggcctacaaacttgtgcctgaaccgtaggccggataaggcgtttacgccgcatccggcatccgagcaccattgcctgatgcgacgcttacgcgtcttatcaggcctacaaacctgtgcctgaaccgtaggccggataaggcgtttacgccgcatccggcagtcatgcgtcgatgccaaatgcgccaccctaaagcagcgcatccgcaatgatgtacttattccttcggtttaaaccgcagcaaccggttggcgttactcactacggtaatgctgctgagcgccattgccgctccggcaactaccgggttaagcagtgttccagtgaacggccacaaaataccggcggcgaccggaataccgatactgttgtagataaacgcaccgagcaggttctgcttcatgttgtgcagcgttgcgcgggaaatagcgagcgcatccgcaacgcccatcaggctatggcgcatcagggtaatcgccgcggtttcaatggcaacatcactgccgccacccatcgcaatgccgacatccgcctgagccagcgctggcgcgtcgttaatgccgtcgcccaccattgccacctaacgtccttcactttgcagatgtttgatcgcttcggctttaccgtccggcagcaccccggcgatcacctcatcaatccctgcttctttggcgatcgcattggcggtggttgggttatccccggtcaacatcaccagacgatatcccgctttatgcaggcgttgcagcgccgccacgctatcactacgcaacggatcgcgtactgccagcagggctaccgctttcccgtcaaccgccagcagcacaggcgttgccccttggcttgcctgagcagtaatctccgcttcgatagctttggtaccaacctgttgctcatttaacagcgcctgattgcccagcaataacgcatgaccttcagcttcaccgctcacgcccagcccgcgcaatgtgcggaaaccgttgacctgcggtagctgcatatcacctgctttatcgaggatcgctcgtgccagcggatggctggaaccttgctccagtgccgccgccagacgcaatgcctgcgcttcatcaacatcagcaaatgttttcactgcgacaacctgcggcttcccttcagtcagcgtcccggttttatcgaacactacagtgtcgagtgtactggcgcgttgcagcgcgtcagcgtcccgcaccagcacgccaaactcagccgcccgcccgacgccggaaataatgctcatcggcgtcgccagccccagcgcacacggacaggcaataatcagtaccgtggtggcaatcaccagggtatagacaatctgcggtgccggaccaaagaaataccagattgccgcactgacaagcgcaataaccaccactaccggcacaaatacggcactgattttatccgccagctgaccgatttctggcttgctgctctgggcctggcgcaccatgcgaatgattcgactcagcgtagtatggctgccaaccgcactggcacgaaacagcacactgccgtcctgtaccactgtcccggcatggacgctatcgccttcgcctttttgctgcgggattggttcgcccgtcagcatcgcttcatccagccatgcttcgccctgggtaatctcgccatctaccggcacgcgatcgccggtcgtcaggcgcagcaacatacctggctgcacttctgccagaggcacgcttttttcaccttcgtcagtaaccaggcgtgccgtcggcggggttaaatcgagtaacttttccagcgccttagaagaacgctggcgtgcgcgcgcttccagcatatggccgagattgatcagaccgataatcatcgcgctggcttcgtaataaagatgtcgcgcttccatcgggaaccactgcggccacaggttgacgctcatgctatagagccacgccacgccagtacccagcgccaccagcgtatccatcgtcgccgcaccgttcagcaggcttttccatgcactgcggtaaaaatggccgccggcgaaaaccatcactgccagggttatcaggccgataaccaaccacaggctgcggttgtcagcggtgaccatcatgttatcgccgatcatcccccagaccatcaccgggatacccaccgccagtgcgacaattgcctgccagcggaagcgcttcatcgtagcgacggcggtttcttgctggcgctcgcggcgtttagcgtcatcttcaatcgcttccgcgccgtagcccgctttttccaccgcctgcactaaatcttgtggggaggcactgcccatcaccagcgcagtacgctccgccaggtttacccgtgcctgagtgacgcccggtacgctttgcagcgcattttgtacgcgggtgacacagctggcgcagctcatgccgctcagcagcaactgctggctgtcatcgtcatcggcggtcgctgccggaagcgcctcagaaaccgctgtcagtgcttcgctcgggatactactctccgccagcggtttagcctttgggtggcttacagatgcgtcataacccgcttgtttgatggtttcgatcagctgttctgcactggcagtcccggtaacgtgcgcttcagtgatagacacatccgcctgctcaacatccggacgctgttcaagactttctttcacgcgtttaacgcagtgaccgcaggacaggccgtccagggtcaggtcgatagtttgactcataaaacactcctttaagacagttttgactggctgtgataaaggttaaaccttccagcaaggggaaggtcaagaaattaataaaccaggcgggtaaaagtccgtaaagattaaaaaatcggctcgatttgcatcaggattagacatttatctctttgttttcctgtagttaagttgcgggtgctaagttaaatcaggatgcctgaaaatcggcaccggggtgaggaattacctcccgcatctataaaaaggagttaacaaaagatgttagatgcaaacaaattacagcaggcagtggatcaggcttacacccaatttcacagtcttaacggcggacaaaatgccgattacattccctttctggcgaatgtaccaggtcaactggcggcagtggctatcgtgacctgcgatggcaacgtctatagtgcgggtgacagtgattaccgctttgcactggaatccatcagcaaagtctgtacgttagcccttgcgttagaagatgtcggcccgcaggcggtacaggacaaaattggcgctgacccgaccggattgccctttaacagtgttatcgccttagagttgcatggcggcaaaccgcttagcccactggtaaatgctggcgctattgccaccaccagcctgattaacgctgaaaatgttgaacaacgctggcagcgaattttacatatccaacagcaactggctggcgagcaggtagcgctctctgacgaagtcaaccagagcgaacaaacaaccaacttccataaccgggccatagcctggctgctgtactccgccggatatctctattgtgatgcaatggaagcctgtgacgtgtatacccgtcagtgctccacgctcctcaatactattgaactggcaacgcttggcgcgacgctggcggcaggtggtgtgaatccgttgacgcataaacgcgttcttcaggccgacaacgtgccgtacattctggccgaaatgatgatggaagggctgtatggtcgctccggtgactgggcgtatcgtgttggtttaccgggcaaaagcggtgtaggtggcggtattctggcggtcgtccctggagtgatgggaattgccgcgttcagtccaccgctggacgaagatggcaacagtgttcgcggtcaaaaaatggtggcaagcgtcgctaagcaactcggctataacgtgtttaagggctgatcatgatgaacacggaaggtaataacggtaacaaacctctcggtctatggaacgtcgtttccatcggcattggggcaatggtgggggcggggatcttcgcgctgctggggcaggctgcattgctaatggaagccagcacctgggtcgcctttgcttttggcggtattgtggcgatgttttccggttatgcctatgcgcgtctgggggcgagctatcccagcaatggcggcattatcgacttctttcgtcgcggattaggcaacggcgtctttagcctggcgctcagcttactgtacctgttgacgctggcggtgagcatcgccatggtcgcccgtgcttttggcgcttatgccgtgcagtttttgcatgaaggcagccaggaggagcaccttattttgctctacgcgttggggatcattgcggtgatgacgcttttcaactccttaagcaaccatgcggtagggcggctggaagtgatcctcgtcggcattaaaatgatgatcctgttattgctgattattgccggtgtctggagcctgcaaccggcgcatatttccgtctctgcgccccccagctccggtgcgttcttctcctgtattgggataactttccttgcctatgcgggctttggcatgatggcgaacgcggcggataaagtgaaagatccgcaggtcattatgccacgggcgtttctggtggcgattggcgttaccacgttgctttatatcagcctggcactggttttgcttagcgatgtaagcgcattagagttagaaaaatatgccgataccgccgtagcgcaggctgcttctccgctgctcgggcatgtgggttatgtgatcgtcgtcatcggcgctttactggcgacggctagtgccattaacgcgaacctgttcgccgtgtttaacatcatggacaacatgggcagcgaacgcgaactgccgaagctaatgaataaatccctgtggcggcagagtacctggggcaacattattgtcgtggtgttgattatgctgatgacggcggcactgaatttaggcagtctcgccagcgttgccagcgccacctttttgatttgctacctggcggtgtttgtggtggcgatccgcctgcgtcatgatattcacgccagcttgccgattcttatcgttggtacgttggtgatgttgttggtgatcgttggctttatctacagtctgtggtcccagggtagccgtgcgttgatatggattattggcagtctcttactcagccttattgtggcaatggtcatgaagcgcaataaaaccgtataacatctctctgtgcgcagtacttcctgtattattgtggtggcggtcgatattcgcactggcaaaaaaacgtgcttgaatatctgttgaaaccctttaacaaagcacaggaggcgttgcgcgaacgatgaacatcagcgatgtagcaaaaattaccggcctgaccagcaaagccattcgcttctatgaagagaaggggctggtgacgccgccgatgcgcagcgaaaacggttatcgcacctacacgcagcagcatctcaacgaactgaccttactgcgccaggcacggcaggtgggctttaacctggaagagagcggcgagctggtgaatctgtttaacgacccgcagcggcacagcgccgacgtcaaacggcgcacgctggagaaggtggcggagatcgaacgacacattgaggagctgcaatccatgcgcgaccagctgctggcactggcgaatgcctgccctggcgatgacagcgccgactgcccgattatcgaaaatctctccggctgctgtcatcatcgggcagggtgattaagagctgacggctcggatatgtagggttatcccttctatcgcaatgacttcaacatgcgtacctgcaccgagatcctcgctggcgctgacaggccaactactgtcaccgacgcgcatatgaccgcgcccgttgaccagcggagattccagcacaaaacgtcggccaatcagctgctgcccgcgctggtttaaatgactatcgctgtgcttttgttcgcgcacccgccggctcaaccatttccaccacagccaggcggcgagcagcgtcaggatggcaaacattaccccttgccactcccaacccagcggcaccagccagaccaccaggccggtaatcaccgctgccacgccgctccacaacaaataaccatttccgcccagcatctcggctgccagcagcaaaccgccgagactgagccagaaaatatgtggatgaacgaccattaactccatcatggctgagtccgtttgttggcgctgtctttcaccagctcggcaatcccggcaatgctccccatcaggctgctggcctctaatggcatcatcactactttgctgttactggaggaaccgatctgctgtaacgcttcggtgtatttctgcgctacgaagtagttcaccgcctgaatatcaccggaggcgatagcttcagacaccattttggtggcgcgggcttctgcttcggcggaacgttcacgcgcttcagcctgtaaaaacgcgctctgacgttcgccttccgctttcaggatttggctctgtttttcaccttcggctttgaggatttccgcctgacggatcccttccgcttcaagaatgtaagcgcgtttggtacgttccgctttcatctgcgcgttcatactagagataagctctgccggtgggcgcacgtcgcgaatttcaatacgggtgactttaatcccccacgggttggtggcttcatcgacaatacgcagcaggcgactgttgatgctgtcgcgctgagagagcatttcgtcaagttccatactacccagcacggtacggatgttagtcatggtcaggttgatgatcgccagctccagattgctgacttcataagccgcgcgcggcgcgtcaatcacctgaataaagcacacggcgtcgatggtaacgttggcgttatctttgctgataacttcctgggaagggatatcgagcacttgctccatcatattgatcttgcgaccaatgcgatccataaacggcaccaccagactgagccccggctgtaacgttttggtatagcgaccaaagcgttctactgtccactgatagccctgcggtacgattttgacacccgcgccgacaatgaccagcgcgacaaaaatgagaatcgggataaagataagcatcggaaaaacctcctgttgtaccgtccataatcagcaaaattgctgcttgattaaacaaattatacctgattactgaaagagagttcccccttattcctgcgaaggataaactgtttttagtaaaaatcagaaaaagggaacagcgatgcaggaaaatagtcctttgcttcagctacaaaacgtaggatatctggcgggtgatgcgaagattcttaataacatcaattttagcctgcgtgctggcgaatttaagttaattaccggtccttctggttgtggcaaaagtacgctgctaaaaatagttgctagtttgatcagcccaaccagcggaacgttactgtttgaaggtgaggatgtcagcacactaaagccagaaatctaccgccaacaagtctcttactgcgcccagacaccgacgctgtttggcgatacggtatacgataatctgatctttccctggcagatccgtaaccggcagcctgacccagccatttttctcgattttctcgaacgcttcgccttgccggacagcattttgacgaagaatatcgccgagctatctggtggtgaaaaacaacgcatcagtttgattcgtaacctgcaatttatgccgaaggttttattgctggatgaaataaccagtgcgctggatgaaagtaataaacataacgtcaatgagatgatccatcgttatgtgcgcgagcaaaatattgccgtgctgtgggtgacacacgataaagacgaaattaatcatgcggataaagtgattacactgcaaccgcatgccggagaaatgcaggaagcacgctatgaactcgcataactaaagaaatgcaggaagcacgctatgaacagccataatattactaacgaaagtttagcactggcattaatgctggtggtggtggcaatcttaattagccataaagaaaaactggcgctggagaaaaatattctctggagcgtcgggcgagcgataattcagctgattattgtcggctatgtgctgaagtatattttcagcgtggatgatgccagcctgacattattgatggtgttatttatctgctttaatgcggcgtggaacgcgcaaaaacgcagtaaatatattgctaaagcttttatcagtagctttattgccattacggtcggggcgggaattaccctggcggtgctgattctcagtgggagcattgaatttatcccgatgcaggtgatccctatcgccgggatgattgccggtaacgccatggtagcggtggggttgtgttacaacaatttagggcaacgggtcattagcgaacagcaacagattcaggagaaactgagtcttggtgcgacgccgaagcaggctagtgcgatattgattcgcgacagtattcgcgcggctttaattccgacggtcgatagtgcaaaaacggttggcttagtgagtttaccaggaatgatgtccgggctgatatttgccgggattgatccggtgaaggcgattaaatatcagattatggtgacctttatgctgctcagtaccgccagcttgagcaccattattgcctgctatttaacctatcgtaagttttataatagccgccaccagttggtggtgacgcaattgaagaagaaatgatgcgatgccggatgcgcagcatcgcatccggcgttgtggttcatgtgccgatcaacggaatatcaatacaacaatgcatacagctggcggcgatacttgctcgccagtgcatcacccgtacccagcgcagcgaggatctcctggaacgttttacgcgtctgaccgtctgcggcggtgagatctttacgcagatgcccgaacagcaactccagcgcctcttcattgcgcccaacctgatgcagttgcagcgccagttgcgtcgccagtgcggcatcttctggattctccgccacctgctgttgcaactgttgaatttccggcgtatcagccgcctgcttcagcagttcgatttgcgccaccagcccctggtagcgggtgtcctgatcctgcaacggaatggttttcagcaccgcttccgcatcttcagaacggttcagcgcaatcagcgtttctgccagcagcaggccgatctccccgttctgattgctcaactgccaggcgtctttcagcaatggcagggcatcggtgtaattgctttcctgcatcagttgcatcgcctgctgcgctttcagctcttcttcgcgcggcagcactttatccagcagggcgcggatcgcctcttccggttgcggcccctggaagccatctaccggttgcccgttctggaacagatacacggtcggaatcgcacgcagaccaaactgcgcggcaatcatctgctccgcgtcgcagtccagcttcgccagaataaattgcccgttgtactgcgccgcgaggctttccagaattggggttaactgcaaacagtgctggctacgttcagaccaaaaatagaacagcaccggagtggtcatgctctgttcaagaacctgttgcaggttagattcgttaatgttgacaatattttctacggacatggagtcgctctctgttgtcgatattttctttgacatgggggcttaagcgcgcgcttcaactcacccctgcaatattttgtccatcacgcgccccggcagcaggcgcttaagcaccattaccgcccaggtcaccagcgtcaccggatagcgcatcttcggcttctcgctaataaaagcatggcgtactttgtccaccaccgcttccggtcccaacgtaaagcgggcggcgatgccgggattttcgactggtttatcactttgcgtctggttgacgttgtcggtgaagcgagtacgaatgggaccgggttcgatcaggctgactttaattccgctgtggcgcagctccatgcgcagtgcatcactccacgcctccagcgcatatttactggccgcgtaagcgccacgacccggcgtggagattaatcccatcacgctacttgtcatcacaatacgcccttcaccgtgcggtaacatcgcgggtaacaggcgcatggtgagctggtgtgcgccgaaaaagttggcggaaaactgctgttccatctgcgcacggctgatggtggaaagggggccatacatgccgaatccggcattgttaaagatcccatacagacaattatcggtcagggcgatcacctcgtcggctgcgcgatcaacactttctggactatccagatcgatcaacacgccggtaaatcccatgctgttcatgcgctcaacatcatccggtttccggcaacctgccagcacatgaaaaccctggcgttttaattcgagcgcgctttccaggccaattccactggaacatccggtaattaagacgcttttttgcataactttacctgtcaggatctccgttgctttatgagtcatgatttactaaaggctgcaacttatttaactgtcatgatttactaaaggctgcaactgcttcgccatccagtcggcaataaacggctgggcgtcgcggttgggatgaataccgtcatcctgcatccattgtggcttgaggtagacctcttccataaaaaagggcagcagcggaacatcaaactctttggcgagtttggggtaaatggcgctaaaggcttcattataacggcgaccatagtttgcaggcagacgtatttgcattaacaatggttcagcgttggcggctttgacatcctgcaaaatctggcgcagcgtttgctcggtttgctgtggctgaaaaccacgcaaaccgtcattgccgcccagttcaaccagcacccaacgcggctgatgctgtttcagcagagccggaaggcgcgccagtccttgttggctggtgtcgccgctgatgctggcattaactacgctcgttttactctgccacttatcattcaacaaggcaggccaggccgcgctggcagacattcgatacccggcgctcaggctatcacccagaatcaataacgtgtccgctgcggcggcacggaaggttaacaggaccaggaacaggaagggcaaatgccagcggaaaacattgttgaagttcatcatcttaagaagtccgtcggtcagggggagcatgaactctccatcctcaccggagttgagctggttgtcaaacgtggcgagaccatcgcactggtgggcgagagcggaagcggtaagagtaccttgctggcgatcctcgccgggcttgatgacggcagcagtggcgaagtgagtctggtgggacaaccgctacataatatggacgaagaagcgcgggcaaagttgcgcgcgaagcacgtcggctttgtttttcagagttttatgttaattcctacccttaacgcgctggaaaacgtcgagcttccggctctgctgcgcggtgagagtagcgcggaaagtcgtaacggggcgaaagcgttgctcgaacagttagggctgggtaaacgtctggatcatcttccggcacagctttccggcggtgaacagcaacgagtggcgctggcacgagcctttaatggtcgacctgatgtgctgtttgccgacgaacccaccggcaaccttgaccgccagacgggcgataaaattgccgacctgctgttttccctcaaccgtgaacatggcaccacgttgattatggtgacccacgacctgcaactggcggcacgctgcgaccgctgcttacggctggtgaacgggcagttgcaggaggaagcatgattgcacgttggttctggcgcgaatggcgtagcccgagcctattaattgtctggctggcgctaagcctggcggtggcctgcgtgctggcgctgggcaatatcagcgatcgcatggagaagggcttaagccagcaaagccgtgagtttatggcgggcgatcgggcgttgcgcagtagtcgcgaagtgccgcaagcgtggctggaggaagcgcaaaagcgcggcctgaaagtcggcaagcagctgactttcgccacaatgacctttgcaggcgacacaccgcagctggcgaacgtcaaagcggtggatgatatctacccgatgtatggcgatctgcaaactaatccccctggcctgaaaccgcaggcgggcagcgtattgctggccccacgcctgatggcactgcttaacctgaaaacgggcgacaccattgacgtgggcgatgccaccttgcggattgccggagaagtgattcaggaaccggattccggttttaaccccttccagatggctccgcgtctgatgatgaatctggcggatgtcgataaaaccggagccgtgcagccggggagtcgggtcacctggcgttataaattcggcggcaacgagaaccagctcgacggctatgagaaatggttgttacctcagcttaaacccgaacaacgctggtacggtctggaacaggacgaaggcgcgctggggcgaagcatggaacgcagccaacagttcctgctgcttagcgcgcttctgaccttgctgctggcagtggcagcggtggcggtagcgatgaatcattactgtcgcagtcgctacgatctggtggcgatcctcaaaacgctgggggcagggcgagcgcaactgcgtaagctaatcgtcggtcagtggttgatggtgctgacgcttagtgccgttaccggtggggccataggcctgttgttcgaaaacgtgttgatggtgctgctcaagcccgttctgcctgctgcactaccgccagccagcctctggccgtggctgtgggcgcttggcaccatgacggtcatcagcctgctggtggggctacgaccatatcgcttgttgctggcaacgcagcctttacgcgtattacgtaatgatgtggtagcgaacgtctggccgctgaagttttatctgccgattgtcagtgtggtggttgtgctgctgctcgccggattaatgggtggcagcatgctgctttgggcggtgctggcgggcgcggtagtactggctttgctgtgcggtgtgctgggctggatgctgctgaatgtacttcgccgcatgacgctgaaaagcctgcctctgcgcctggcggttagccgcctgttacgtcagccgtggagtacgttaagtcagcttagcgcatttagcctctcctttatgctgctggcactgctgctggtgttgcgtggcgatctgctcgaccgctggcagcagcagctacctccagaaagcccgaactactttttaattaacatcgccacagaacaggtagcaccgctaaaagcgttcctcgcggaacatcagatagtcccggaaagcttttatccggtggtgcgggcgcggctgacggcgattaacgataagccgacagaaggtaatgaagatgaggcgcttaaccgcgaactcaatcttacctggcaaaatacgcggcccgatcataatccgattgtcgccggtaactggccgccaaaagccgatgaagtgagcatggaagaggggctggcgaaacgcttaaacgttgccctcggtgataccgtgacttttatgggcgatacccaggagttccgcgctaaagtgaccagcctgcgcaaagtggactgggaaagtctgcggcctaatttctattttattttccctgaaggggcattagacgggcaaccgcagagctggcttaccagtttccgctgggagaatggcaacggcatgttgacacaactcaaccgccagttcccgaccattagcctgttagatattggcgcgattttaaaacaggtcggtcaggtgctggagcaggtaagtcgggcgctggaagtgatggtggtactggtcaccgcctgcggtatgttgctgttgctggcacaggtgcaggtgggaatgcgtcagcgtcatcaggagctggtggtgtggcgcacactcggtgcggggaaaaaactgctgcgtaccacgttgtggtgtgagttcgccatgcttgggtttgtttccggcctggtggccgcaattggtgcggaaacggcgctggcagtgttgcaggcgaaagtgtttgattttccgtgggagccagactggcgattgtggattgttctgccgtgcagcggagcgctgctgctgagccttttcggcggctggctgggtgcgcgactggttaagggtaaggcgctgttcaggcagtttgcggggtgatgagagtccctcattaccgcgccttaacccattccgccacttccgcccactcaccgcgaaagacaactttttccgcttttttctcaagctgatagcgatacatcgggtcgtaatattcttcaagtaacggcaccagccaggccagatgaccgtcggtgctgccggtggtgagttgcgttgtcagtgctgcatccagccttgcagccagttcgttatagcgctgtagccccagccgacgcttaatcgcgctaagtccgtgatgcaggtattcgcaatactcctgccagccctgttcgtcgccgtacgcgtgggtaaaatcatgatgcatacgcaagaaatactcttcgttcaggcgctcaagacggatctcaaacggatcttctaccaccgcaatcgccgcctgagtcattcgctcgcgcaggcattccggcaggtgattgctaccgatcatccggctttcgtcttccagcacccacaggcgcaaattctgacgggcgtcggtttttagcatttcggcagccagcaggttttcaaaactcgcctggctaagttgtggttgtaacgtgcgaccaaacgcgctaccgcgatgacgcgccaacccttccagatcaacaccgttcggctgttgctgcactaacagcgttttaccgctgccggtacaaccgccaatcagcactatcggtttttgtgccagttcaatagtcgcctgaatcgcggtctggcgcagtgccttataaccgccttccaccagcggataatcaatccccgctgcatgcaaccagctttgcacaatatgactgcgctgaccgccacgggcgcagcagagaataccttgcggattttgcaggcacgctgcccgccaggcgtccatgcgctgctgacgaatttcacccgccaccagtttatgtcccagcgccagcgctgcgtcactgccttgctgtttatagcaggtgccaacggcggcgcgttcatcgttattcattaacggcagattgatagcggcgggcattgcgccgtgctcaaactcgataggggcgcgaacatcaataatgggcgtatcagcaatcagcagggcacgatagtcctgttccgtgtgtctctcttgcatagttaaaagtgaacctcaaatcagcttgcgcgctattttacgcgccaacgcgcaaggaaacttgatttttaactgcgtgggttgccgaaaatttctaaaaatccgctgatttccggcctgcgctgggtaaacaaggtcacaatatcttctaccgctttgccgctgccaaatttgcgccatgccagactcaatgggctaggagggcgcatcgttgggattacccggctgaccagttgttgattatcgatcatactctggcaaaggctttttggcaaaaaaccaatgccaacgcccgccagatgggcggcgattttcgtttccatatcgggaacaataatctctttttgccctggcaatcgccaggcgacgcgtttggttaaggtgcgggcgctgtcttcaatattgaccgccggaaagcgccgcaactgcgcttctgttagcggctcttcaacgttcgccagcggatgatccgccgccatgacaaagcgccattgcacgcttcctaagggatcaagactaaaggtatttgccagcgcctcagttcccgtgacgccgatagccaggctaaaaccttcgtacaataggctgtcccagacgcccatatagatttgtcgggagatgtgaaactgggtaaaggggtaacgctcattcagccacgccagcaactgggcgacggcctgggggttgtagagcaggttgttgatgacaatattcacctggcgttccacgccatcattcacctgttgcagctcgcttggcatactttccagccagctcagccagtctctggcctgggaaagtagatgctcgccagccgctgtcaacgtcacgctgcgagtcgtacggaaaaacagcgctactccggtattctcttccagaagtttaatgcgataactgatcgtcgccgtggttttacataatcgttctgccgctttactaaaacttcctgtttcagcaaccgcaatgaaagtccgcaaggtttctggatcgaacatcttcaggtatccccttttaaatccgcaagttgcgtgattttcttatcctctgatttatcagtatttttacatgataaccctgttcaatttgtggactaaatctagttttggaaaaatattccaacttttgtattgatgttgttctcttaaggttttagattgcctgttattgaaaccaagctgaccggtcggcggtggttgaacggaattatgttacaaggacaaaaagatgaaacttcaggtattaccgttaagtcaggaagcctttagtgcttatggcgacgtaatcgaaacgcagcaacgggattttttccatattaacaatggcctggtggagcgttaccacgatttggcgctggttgagattcttgagcaagactgtacgcttatcagcattaaccgcgcgcaaccggcgaatctgccgctgaccattcacgaactcgaacgtcatccgctgggtactcaggcctttatcccgatgaaaggtgaggtgtttgtggtggtcgtggcgttaggtgacgacaaaccagacctgagtacgctgcgggcgtttatcaccaacggcgaacagggagtgaattaccatcgtaacgtctggcatcacccacttttcgcctggcagcgcgtcaccgattttctgaccatcgatcgcggcggcagtgacaactgtgatgttgaaagtattcctgaacaggaactctgttttgcgtgacgcctgcaaccgacttgcataagataaactaattgttcattgtttatgctcacttgtaggtcggagttaacgtaggtatgacggaagttagacggcgcggcaggccaggacaggcggagcctgtggcacagaagggcgcacaggcgttagagcggggaattgcgattctgcaatatttggaaaaaagtgggggaagtagcagcgttagcgatatttctctcaatctggatttgccgctctccacgacctttcgcttgctgaaggttttacaggcagcggattttgtctatcaggacagtcaattaggctggtggcatataggattaggtgtctttaacgtcggtgcggcgtacatccataaccgcgatgtcctctccgtcgccgggccgtttatgcgccgcctgatgttactttccggcgaaacggtcaatgtcgcgatccgtaacggcaatgaagcggtattaattggtcagttagagtgtaaaagcatggtcaggatgtgtgcgccactgggcagtcgtctgccactgcatgcttccggtgcgggcaaagcgctgctttatccgctggcggaagaggagttgatgagcatcattctgcaaaccggtttgcagcagtttacgccaactacgcttgtggatatgcccaccttgctgaaggacctggaacaagcgcgtgaactgggctataccgtagataaagaagagcatgttgtaggtctgaattgcatagctagtgcaatttacgatgatgtcggtagtgttgttgccgctatctccatctccgggcctagtagtagactgacagaagatcgttttgtcagtcagggtgagctggtcagagacaccgcccgcgatatcagcacggcgttgggactgaaagcacatccataatgtctgtcgcatcccgctctgcggagcgggtttttttgacaaaatttgaaagttggaaaaattttccaataaatagaggtaggaataaaatggcaaaaatgagagccgttgacgcggcaatgtatgtgctggagaaagaaggtatcactaccgccttcggtgttccgggagctgcaatcaatccgttctacagtgcgatgcgtaagcacggcggtattcgtcacattctggcgcgtcatgtggaaggtgctagccacatggcggaaggttatacccgcgcaacggcagggaatatcggcgtatgtctggggacttccggtcctgcgggcacggacatgatcaccgcgctctattccgcttctgctgattccattcctattctgtgcattaccggccaggcaccgcgcgcccgtctgcataaagaagattttcaggccgtagatattgaagcaattgctaaaccggtcagcaaaatggcggttacagttcgtgaagcggcgctggtgcctcgcgtgctgcaacaggcatttcacctgatgcgttctggtcgtccgggtccggtactggtggatttaccgttcgacgttcaggttgcggaaatcgagtttgatcctgacatgtacgaaccgctgccggtctacaaacctgctgccagccgtatgcagatcgaaaaagctgtagaaatgttaatccaggccgaacgtccggtgattgttgccgggggcggggtaattaatgctgacgcagctgcactgttacaacagtttgctgaactgaccagcgttccggtgatcccaacgctaatgggctggggctgtatcccggacgatcatgaactgatggccgggatggtgggtctgcaaaccgcgcatcgttacggtaacgcaacgctgctggcgtctgacatggtgtttggtatcggtaaccgttttgctaaccgtcataccggcagcgtagagaaatacaccgaagggcgcaaaatcgttcatattgatattgagccgacgcaaattggtcgcgtgctgtgtccggatctcggtattgtctctgatgctaaagcggcgctgacactgctggttgaagtggcgcaggagatgcaaaaagcgggtcgtctgccgtgtcgtaaagaatgggtcgccgactgccagcagcgtaaacgcactttgctgcgcaaaacccacttcgacaacgtgccggtgaaaccgcagcgcgtgtatgaagagatgaacaaagcctttggtcgcgatgtttgttatgtcaccaccattggtctgagtcaaatcgctgcggcacaaatgctgcatgtctttaaagaccgccactggatcaactgtggtcaggctggtccgttaggctggacgattccggctgcgctaggggtttgtgccgctgatccgaaacgcaatgtggtggcgatttctggcgactttgacttccagttcctgattgaagagttagctgttggcgcgcagttcaacattccgtacatccatgtgctggtcaacaacgcttatctggggctgattcgtcagagtcaacgcgcttttgacatggactactgcgtgcaactcgctttcgagaatatcaactccagtgaagtgaatggctacggtgttgaccacgtaaaagtagcggaaggtttaggttgtaaagctattcgggtcttcaaaccggaagatattgcgccagcctttgaacaggcgaaagccttaatggcgcaatatcgggtaccggtagtcgtggaagttattctcgagcgtgtgaccaatattagcatgggcagcgaactggataacgtcatggaatttgaagatatcgccgataacgcagcggacgcaccgactgaaacctgcttcatgcactatgaataagggagataaataatgttacgtttctctgctaatttaagcatgttatttggagaatatgattttctcgcccgttttgagaaagctgcgcagtgtggttttcgcggcgttgaatttatgtttccttatgactacgacattgaagaattaaaacatgtgctggcgagtaataaactcgaacatacgctgcacaatttaccggcgggtgactgggcggcgggggagcgcggtattgcctgtattcctggccgtgaagaagagtttcgggatggcgtagcagcagcgattcgttatgcccgtgcgctgggtaataaaaaaattaactgtctggtcggtaaaacgccggctggtttcagcagtgaacagattcacgcaacgcttgtagaaaacctgcgttatgccgcgaatatgctgatgaaagaagatattttattactgattgaacctattaaccattttgatattcctggtttccatctcaccggaactcggcaggcgctgaaattgattgatgatgttggttgctgcaatttgaaaattcagtatgacatttatcatatgcagcggatggaaggtgaattaaccaacaccatgactcagtgggctgataaaattggtcacctgcaaattgccgataatccgcatcgcggcgaaccgggaaccggagaaattaattatgattatctctttaaggtaatcgaaaattctgactacaacggttgggttgggtgtgaatataaaccccaaaccaccacggaagccggtttacgctggatggatccgtaccgttaaaacgtaacgctattcagacaatgcttttttaggccgctaagttggcaggggatcgtgttgtctgaattcaggaaaagcgaaatttaaaagaggttaattatgaaactgggatttattggcttaggcattatgggtacaccgatggccattaatctggcgcgtgccggtcatcaattacatgtcacgaccattggaccggttgctgatgaattactgagtctgggtgccgtcagtgttgaaactgctcgccaggtaacggaagcaagcgacatcatttttattatggtgccggacacacctcaggttgaagaagttctgttcggtgaaaatggttgtaccaaagccagcctgaagggcaaaaccattgttgatatgagctccatttccccgattgaaactaagcgtttcgctcgtcaggtgaatgaactgggcggcgattatctcgatgcgccagtctccggcggtgaaatcggtgcgcgtgaagggacgttgagcattatggttggcggtgatgaagcggtatttgaacgtgttaaaccgctgtttgaactgctcggtaaaaatatcaccctcgtgggcggtaacggcgatggtcaaacctgcaaagtggcaaatcagattatcgtggcgctcaatattgaagcggtttctgaagccctgctatttgctagtaaagccggtgcggacccggtacgtgtgcgccaggcgctgatgggcggctttgcttccagtcgtattctggaagttcatggcgagcgtatgattaaacgcacctttaatccgggcttcaaaatcgctctgcaccagaaagatctcaacctggcactgcaaagtgcgaaagcacttgcgctgaacctgccaaacactgcgacctgccaggagttatttaatacctgtgcggcaaacggtggcagccagttggatcactctgcgttagtgcaggcgctggaattaatggctaaccataaactggcctgatacccgcaataaaaatggccgatatcagaaaatgaatcggccagcaatattaaaaaagaaagcagccaaagatgttgctagtgtattaaaaataatatttttattttatttgttcctcatagctagattaaaacaacgttatagcatacgtgaaattaagagggatttatggaacatcagagaaaactattccagcaacgcggctatagcgaagatctattgccgaaaacgcaaagccagcggacctggaaaacatttaactattttaccttatggatgggtagcgttcataacgttcccaattatgtgatggtcggcggcttttttattctcggcttgtctacctttagtattatgctggcaattatcctcagcgcctttttcattgccgcggtaatggtattaaacggtgctgcgggcagtaaatacggtgtgccttttgccatgatcctgcgtgcttcttacggtgtacgtggtgcactgtttcccggattattaaggggcggaattgccgccatcatgtggtttggtttgcaatgttacgcggggagtctggcctgcttgattctgattggcaaaatctggccgggatttttaactctcggtggtgatttcactctgttaggcctttctctaccgggcttaattactttcttaatcttctggctggtcaacgttggtataggttttggcggtggcaaagttttaaataaattcactgccattcttaacccgtgcatctatatcgttttcggcggtatggcgatttgggcgattagtctggtcgggatcggtccaatctttgactacattccgagcggtattcagaaagcagaaaacggtggcttcctgttcctggtggtgattaacgcggtagttgcggtctgggcggcaccggcggtgagcgcatccgactttacgcaaaacgcccacagctttcgtgagcaggcgctggggcaaacgctgggtttagttgtggcctatattctgtttgcggtcgccggggtatgtattattgccggagccagtattcactacggcgctgatacctggaacgtgctggatattgttcagcgttgggacagcctgttcgccagcttctttgcggtactggttattctgatgacaactatctccactaacgcgaccggtaatattattccagccggttatcagattgccgccattgcaccgacaaaactgacctataaaaacggcgtactgattgccagtattatcagcttgctgatctgcccgtggaaattaatggaaaatcaggacagcatttatcttttcctcgatattatcggcggaatgcttggtccggtaattggtgtcatgatggcgcattattttgtggtgatgcgcggacaaattaatcttgatgaactgtataccgcacctggcgattataaatattacgataacggttttaacctcactgcgtttagtgtaactctggtggccgttattttatctcttggcggtaagtttattcactttatggaaccgttaagccgtgttagttggtttgtcggcgtcatcgtcgcctttgcggcctacgccttattaaagaaacgtacaacagcagaaaaaacaggagagcaaaaaaccataggttaattaatcccgatattgaacattgagttaaaaaccaatctgtattttacaaggagtttgttatgtcttttgatttaatcattaaaaacggcaccgttattttagaaaacgaagctcgcgttgtagatatcgccgttaaaggcggaaaaattgctgctatcggtcaggatctgggcgatgcaaaagaagttatggatgcgtctggtctggtggttagcccgggcatggttgatgcgcacacccatatttctgaaccgggtcgtagccactgggaaggttatgaaaccggtactcgcgcagcggcaaaaggtggtatcaccaccatgatcgaaatgccgctcaaccagctgcctgcaacggttgaccgcgctagtattgaactgaagttcgatgccgctaaaggcaagctgactattgatgcggcacaactcggtggcctggtgtcttacaacatcgaccgtctgcatgagctggatgaagtgggcgttgtcggcttcaaatgcttcgttgcgacctgtggcgatcgcggtatcgacaacgacttccgtgatgtaaacgactggcagttcttcaaaggtgcgcagaagctgggcgaactgggtcagccggtgctggtgcactgcgaaaacgcgctgatttgtgacgaactgggcgaagaagcgaagcgtgaaggtcgcgtaaccgctcatgactatgtggctagccgtccggtatttaccgaagtggaagcaattcgccgcgtactgtatctggcgaaagttgctggttgccgtctgcacgtttgccacgtcagcagcccggaaggtgttgaggaagtgactcgtgcacgtcaggaaggtcaggacgttacttgtgaatcctgcccgcattactttgtactggataccgatcagttcgaagaaatcggtactctggcgaagtgtagtccgccgatccgcgatctggaaaaccagaaaggcatgtgggaaaaactgtttaacggtgaaatcgactgcctggtttccgaccactctccatgcccgccggaaatgaaagccggtaacatcatgaaagcatggggcggtatcgccggtctgcaaagctgcatggacgtgatgttcgatgaagcggtacagaaacgcggtatgtctctgccaatgttcggcaaattaatggcgactaacgcagcagatattttcggtctgcagcaaaaaggccgtatcgccccaggaaaagatgccgacttcgtcttcattcagccgaatagcagctatgttcttaccaatgacgatctggaatatcgccacaaagtcagcccgtatgttggccgtaccattggcgcgcgtatcacgaaaaccatcttacgtggtgatgtgatttacgacattgaacagggcttccctgttgcgccgaaaggtcaatttatccttaaacatcagcagtaatctggcccctgcaatgcccgtccttgcggcgggcattctccggttaaggtgtgtttatgttcaattttgcagtcagccgcgaaagcctgttaagtggatttcagtggtttttctttattttttgcaacacggttgtggttcctcctacgctactttctgcttttcagttgccgcaaagtagcctgcttacgctcacgcaatatgcttttcttgctaccgcactggcctgcttcgctcaggcgttttgcggtcatcgtcgcgctattatggaagggccaggtggcctgtggtggggaaccatccttactatcacccttggtgaagcaagccgcgggacaccgatcaacgatatcgccaccagcctggcagtggggattgcactctccggcgtgctgacgatgttgattggttttagcggattaggccatcgcctggcacggttatttacgccgagcgtgatggtcttgtttatgttgatgctgggcgcgcagctgaccactatctttttcaaaggtatgctcgggctgccgtttggcatagccgacccgaattttaaaattcagttaccgccgttcgcgctcagcgtggcggtgatgtgcctggtactggcgatgattatcttcctgccgcaacgttttgcccgttatggcctgctggtcggcaccataaccggctggttgttgtggtacttttgctttccttctagccacagcctctccggtgagttgcactggcagtggttcccgctcggcagtggcggtgctttgagcccgggaattattctgacggcggtgattacaggtctggtaaatatcagcaatacctacggtgcgattcggggcacggatgttttttatccgcagcagggcgcagggaatacgcgttatcgtcgtagctttgtggcgaccggatttatgacgctgataaccgtaccgctggcggtaattccatttagtccgtttgttagttccattggtttattaacccagactggcgattacacgcggcgtagctttatttatggcagcgttatttgcctgctggtggcgctggttcctgcactcacgcgactgttttgcagtatccctttacccgtgagtagtgcggtcatgctggtttcttatctgcctttactcttttccgcgctggtgtttagccagcaaataacgtttaccgctcgcaatatttatcgactcgcattgccgttatttgtcggcatatttttaatggcattaccgcctgtgtatctgcaagaccttccattaacgcttcgtcctctgctcagtaacggcttattggtcgggattttactggctgttcttatggataaccttattccgtgggaacgcatcgaataatttgttgaaaaaggattgataatgaagattgtcattgcgccagactcttttaaagagagcttaagtgcagaaaaatgttgtcaggcaattaaagccgggtttagcaccctctttcccgatgcgaactatatctgtttgccgatagcggatggcggcgaagggacggtggatgcgatggtcgccgcgacgggcggcaacatcgtgacgcttgaagtctgcgggccgatgggcgaaaaagtgaatgctttttatggccttaccggcgacgggaaaacggcggtgattgagatggcggcagcaagtggcctgatgctggtcgcgcctgaaaagcgtaatccgttgctggcctccagttttggtacgggggagttaattcgtcatgcgctggataacgacattcgccatattattctcggcattggcggcagtgcgacggtcgacggcggtatgggcatggcgcaggcgctcggtgtgcgtttccttgatgccgacggtcaggcgctggcggcaaacggtggtaatttagcgcgcgtggcaagcattgagatggatgaatgcgatccgcgtctggcgaattgccatattgaagtagcatgtgacgttgataacccgctggtaggggcacgcggcgcggcggcggtgtttggcccgcaaaaaggggcaacgccggagatggtcgaagaacttgaacaggggctgcaaaattacgcccgtgttttacaacagcaaactgaaattaatgtctgccagatggcgggcggcggcgctgcgggcggtatgggtattgcggcggcggtatttctcaatgcggatattaaaccgggcattgaaattgtgttgaatgcggtcaatcttgcgcaggcagtgcagggcgcagcactggtgattaccggggaagggcgcatcgacagccaaacggcaggcggtaaagcgccgctgggtgtggcgagcgtggcgaagcagtttaatgtaccggtgattgggattgctggcgtattgggtgatggcgtggaagtggtgcaccagtacggcattgacgcggtattcagcattttgcctcgtctggcacctttagccgaagtgctcgccagcggtgaaaccaatctcttcaacagcgcgcgaaatattgcctgcgccattaaaataggtcagggaattaaaaactaacccttacctttaaagcggatgcgatttatatcgcataagagtgcagtactcatgccggatgcggcatgagtaccatatccttcctgaaaatcgcgcaaattctatatattgcagagatcatgtaggcctgataagcgaagcgcatcaggcaatgttacaaaaaaagccacggtataaaccgtggcaaaatccaacatagctaaaaataatcaggcgagtggtatgacttaaatctctacgtcgcggttacaatctttgctgtaaatatagctgaacgcttcaccacgccctacaccataaccagcctgtaaagaataagcgcccataaagatgtaatcgccttttttcaccgggatccagttattgtcgaggttataaaccccctgaccggaaagaatataggcaccgtgttcctgaacgtgtgtttcgatataaccgtggctggcacctggtgcaaaagagaggatatgcatgttcatatcaaaacctaactctttgggcagaaaatccagcagaataacatcgtccatgccttcataatgaatgcgttccagttcgctggcattgccagaaaccagccacggtgcatagccttctaccggaacatagcggcgcttatataaaaagatttggctgtcttcggcctgggcgttaacaaacgtcattaaggagcctggcgggcaataaagatagccaccttcgcttaaggcaaatgttttgccttcggctttggcagtgatatttccagagatcacatacaggaacgtttcaatgccttcgccaccgaagccctgttggttgccaccgttttgatgcagtgtgaccagataatcaacaaaagaggcacccagctttggcgtggagaggattgtcgcgtcacaattttcaaagcccggaataatattttttaccagaccatccggggttaacagtgcgaaattaccgtgtttaacaatcgcacggttagccagtaaatcttcgcggtaaccggtgacgttatttaaatatcccatttatgactccttatttctgccaggcaagttgataaagcatgagtgccaacgttttgaccccttcggcaaggtcggtaatattggtgcgttccgccgggttatggctgatcccgttgatgctggggataaaaatcatgcaggttggtacgcgaggcgcgaaaatttgcgcgtcgtgcccggcaccactgtgcatcacccggtaattcagtttttctctttcacacaattctgtcagggtggcgaccagctccttattcatcggcacgggttcttcgtccatccataaatcgatatcaataccaatgtccatttcatcgcaaatcgcccgcatgtcgttttctaactgttgggtgaaatcgcgcagcacggcagcgtcggtatgacgacaatcaatggtgaacgtggttttacccggcaccacatttaccgtattcgggcgcggctctactttgccaaaggtcagaaccagcggatcgcccatccttttcgctttttcgacgctctgatggcaaatgcgactgaaagcgtaaactgtatcacgacgataacccatcggcgtggtgcctgcatggttactttcgccgttcagcgttaccgtataacgacgctgcccgacaattgcattcaccacgccaatactttgcccattactttccagcacacagccctgttcaatatgcagttcaacaaaggctttaatatcctgacgcggagttagtggggcgttcggaagagtaaatccgcaagccttcatcgcatcgacaaaactatttcctttggcatcacagatattccgcacgtcgtcaggattcgccagcccaaaaatatttttactgccccagaagacatacgggaagcggctgccttcttcttctgccatcgccaccacttcgaccgtacgtagcggcgcgccgtattgcgttttcagccagtcaattgccagccacgccgccagcgcgccgaattgcccgtcaaggttaccgccgttaaccacggtatcgatatggctaccgctcagaaccacttcctgtggatattcggtgccattcaggcgaccgtataaattccccacttcatcgaaacgtgtttccagcccgcttgctgccattctttttttaaattgctgctgggtttccagccattccgggctataaagtaaacgggtcatcccacccgctgggtcagcgccaaaagaggaaagccagggcagcgtttcttctatagcttgacggaaatgtgtaatcataagaaagtcctgtctcaataattattgcgcaaagggatttttcgtttcgtaactcgtgttataaagcgcgtcggaaattaaatactggtaaatatcatcaacaatttcgatgccttcgacggcggctttgcgttgtttaatatcctgatcctgtccgggataataaacctgattaaaaccgggcgcgggggtaatggcatttaattcgcgcatggtctggctaagatgttgacggaataattcgctggaggagaaaaagttcggattaataactatatgtaattgccccaaattacgccctgcgtgtaaatcgtcatacatgctactaacctgtcgcccgaacggtaagccgagtaagacgccactgaggacgtcaatcatcatcatcaggccatacccttttggcccggcggcggggagcagagcatgtaccgcgaacggatcggttgttggtacaccgtttttatcgaccgcccaggtatccgggatagacatattacggctgcgggcgtcgagcacttttccccatgcctgtacggtagtcgccatatcaaaggtaaggatctcgtcgccttctcccggcgcggcaaaggccagggggttagtaccgtagtaaatttccgcgccgccaaacggcaccaccattggatcggactggcacatgctaatgccaatgaatccggcgcgggctgcctgctgcacaaaataagagattgcgccgctgtgacccatccggctgataccgaccaccgcaacgccattttgctgggcggttttgatggcatgttccatacccattttcgccgcgacctgtccggcggcattgtcggcatgtaaaattgcgctgcacggcccggtttcctcaagacgaaactccggttcgcggttggtgccgcctttactaatgcgttccgcgtagtattccacgcgcaccgcgccatgagagtggatccctctggcatcggcgtaaaccaatacttcagccacggttgcagcgtgctcacgttttaacccagcctggcagagtttattctcaattagctggtggagtgtttcccgactgattttcatctgtcttcctttttaacgacggtgtgaagcatgactgcaattaacatacagggaaaatatctggattatgtgatccagacaggcaaaaaaatatagttagaatttatttgataatccgctcacttttaacctgatttttaaaacaacaacgcttattaaaaaataatgagtaatagcctggtggttatttgaattcttttgttaataattcctgtgtgatattcatcaccttatttactcgttgtcatcgataccgtaatcgccacattaacactgctcgtgcaattgccatgggtgcaatttttaaggagttgttatgatccacgcctttattaaaaaagggtgttttcaggatagcgtcagtttaatgattattagtcgaaaactcagcgaaagtgaaaatgttgatgatgtttccgtaatgatgggtacgcccgccaataaagcgttattagataccacaggtttctggcatgacgattttaataacgccacgccgaacgatatttgcgtggcaattcgtagcgaagcggcggatgcggggatcgcgcaggcgattatgcagcagcttgaagaggcgctaaaacaactggcgcaggggagtggcagcagccaggcgttgacgcaggtgcgtcgctgggacagtgcctgtcagaaattacccgatgccaatctggcgctgattagtgtggctggcgagtatgcggcggagctggcaaaccaggcgctggatcgcaacctcaacgtgatgatgttctccgataacgtcacgctggaagatgaaatccaacttaaaacccgcgcgcgggaaaaaggcttgctggtgatggggccggactgcggtacgagcatgattgccggcacaccgctggcttttgctaacgtgatgccggaaggcaatattggcgtcattggcgcttccggtaccgggattcaggagctgtgtagccagattgcgctggcaggggagggaattactcacgcgattggccttggcgggcgcgacctcagccgtgaagtgggcggcatcagtgcgctaacagcgctggaaatgctcagtgcagacgagaaaagcgaagtgctggcatttgttagtaaaccacctgccgaagctgtgcgtctgaaaattgttaatgccatgaaagcaaccggcaaaccgacggtggcgctgtttttaggttataccccggcggtggcccgcgacgagaatgtctggtttgcctccagcctggatgaggccgcacgcctggcttgcctgcttagtcgcgtcacggcgcgacgtaacgcaatagcgcctgtcagcagcggatttatttgcggtttgtataccggcggtacgctggctgccgaagcggcgggattacttgccggacaccttggcgtggaagccgacgatacccatcaacatggcatgatgctggacgccgatagccaccagattattgacctcggcgatgatttctacaccgtcgggcgtccccatccgatgatcgacccaaccttacgcaaccagttaattgccgatctcggcgctaaaccgcaagtgcgcgtgttgctgcttgatgtcgtgattggcttcggtgcgaccgccgatcctgccgccagcctggtgagcgcctggcaaaaagcctgtgccgcgcgtttagataatcaaccactgtatgccattgccacggtgacaggcactgaacgtgacccgcaatgccgcagccagcaaatcgccacgctggaagatgcggggattgcggtcgtgagtagcctaccggaagccaccttgctggcggcagcgttaattcatccgctcagccctgccgcacagcaacacacaccgagtttactggaaaacgtcgccgtgattaacatcggattacgcagctttgcgctggagctacaaagcgccagcaaaccggttgtgcattaccaatggagcccagtcgccggtggcaataaaaaactggctcgtttattagaacgtttgcaataaggggttcccatgtttacatcagtggcgcaagccaatgctgcggttatcgaacaaattcgtcgcgctcgtccacactggctggatgtgcaaccggcttcttcacttatcagcgaactaaacgagggcaaaacactgcttcacgccgggccgccaatgcgctggcaggagatgaccggacccatgaaaggggcgtgcgtgggcgcatgtctgttcgaaggttgggcgaaagatgaagcgcaggcgctggcaatactggagcagggggaagtgaacttcattccttgtcaccatgtgaatgccgtcgggccaatgggcggtattacttctgccagtatgccgatgctggtggttgagaacgtgaccgacggcaaccgggcgtactgcaacctcaacgaaggtatcggcaaagtgatgcgttttggcgcttacggcgaagatgtcctgactcgccatcgctggatgcgcgatgtgttaatgccagtattaagcgcggcgctggggcgcatggagcgcggtatcgatctcacggcgatgatggcgcagggcattacgatgggcgatgagttccatcaacgcaatattgcttcctctgcactgttaatgcgtgcgctggccccacaaattgctcgcctcgatcatgataaacagcacatcgccgaagtgatggatttcctcagcgtgaccgatcagttcttcctcaacctcgcgatggcttactgcaaggcggcgatggatgctggcgcgatgatccgcgcaggcagcatcgtcacggcaatgacccgcaacggcaatatgttcgggattcgggtaagcgggctgggcgaacgctggtttactgcgcctgtaaacactccgcaaggtctgtttttcaccggcttctcgcaggagcaggcgaacccggatatgggcgatagcgcgattaccgaaacctttggtatcggaggtgcggcaatgatcgcagcgcctggcgtaacgcgctttgtcggtgcgggtggcatggaagcggcaagagcggtatctgaagagatggcggaaatttaccttgaacgcaatatgcagttgcagatcccaagctgggattttcagggcgcgtgcctggggctggacattcgtcgcgtggtagaaaccggcattacgccactcatcaataccggtatcgcccataaagaggcggggatcgggcagattggcgcaggcaccgtgcgggcaccgctggcgtgctttgaacaggcgctggaagcactggctgaaagcatgggtattggttgaggaacgcgcaatgacgatcatccatcctctgcttgccagtagtagcgcaccgaattatcgccagtcctggcggttagcgggagtgtggcggcgggcgattaacctgatgacggaaagcggcgaactgttaacgttgcatcgtcagggtagtggtttcggccccggaggatgggtgcttcgccgtgcgcaattcgatgcgttatgcggtggattatgcggcaatgaacgaccacaggttgtggctcaagggattcgcctcgggcgtttcacggttaaacagccacagcgttattgtttgctgcgtattacgccgcctgcgcatcctcaaccacttgcagctgcatggatgcaacgcgcggaggaaaccgggcttttcgggccactggcgttggcggcaagcgatccgctgcctgctgagttacgccagtttcgtcactgttttcaggccgcgctcaatggcgttaagaccgactggcggcactggctgggtaaaggccccggattaacgccgagtcatgatgacacgctgagcggaatgctgctggcggcctggtattatggcgctttagatgcgcgctccggtcgtccgttttttgcctgttccgacaatctgcaactcgttaccacagcggtgagcgtcagttatttacgttatgccgcgcaaggatatttcgccagcccactcctgcactttgttcatgctctgagttgcccgaaacgtaccgctgttgcgattgatagcctgctggcgctggggcatacgagtggggcagatacgctgctggggttctggcttggccaacaattattacaaggaaaaccatgaaaacactggttgtggctcttgggggcaacgccttactccagcgcggtgaggcgctgacggcagaaaatcaatatcgcaatatcgccagtgctgtacccgcgctggcacgcctggcccgttcttatcggttggcgattgttcacggcaacgggccgcaggtggggctgctggcattgcagaatctggcgtggaaagaggtagaaccgtatccgctggatgtgctggttgcggaaagccaggggatgattggctatatgctggcgcagagtttgagcgcacagccgcagatgccgcccgtgacgacggtgctgacgcgcattgaggttagccctgatgatccggcgtttttgcagccagagaaatttattggtccggtttatcagccagaagaacaagaggcactggaagcggcttacggctggcagatgaaacgtgatggtaaatatttgcgccgggtggtggcgtctccgcaaccgcgtaaaattctcgacagcgaagccatcgagttgttgctcaaagaggggcatgtggtgatttgcagtggcggcggcggtgtgcctgtgacggatgacggagcagggagtgaagcagtgattgataaagatctcgccgctgcgttgctcgccgagcagattaatgcagatggactggtgatcctcaccgatgctgatgcggtatatgaaaactggggaacgccgcagcaacgtgccattcgccatgccacaccggatgagttagcgccatttgccaaagccgatggtagcatggggccgaatgtaacggcggtgagtggttatgtcagaagccgtggtaaacccgcgtggattggggcgttaagccgaattgaagagacgctggcgggcgaagcggggacctgtattagcctgtaatcgtaggcattagacatttgtgcctgatgcgacgcttgacgcgtcttatcaggcctacaaccggtgccgcatccggcaattggtgcacaatgcctgatgcgatgcttgacgcatcttatcaggcctacaatgggtaccggatcggtaggccggataaggcgtttacgccgcatccggcaagaatagagcaccagttaaccgaacttactctgcgcccaaatcacgccgctggcatattccggcggcagcagcgggattaaggcttccagcgtcgcagtcagacggcttgtgtcgctgtcggtcaaattcagatgccccactttacgccccggacggacttctttgtcgtaccagtgcagatgcaccagcggcagtttcagccagtcataattcacatcgctaccaatcagattgatcatcacgctcggattattcaccactggttgcggtaacggcagatcggtaatcgcccgcagatgcagctcaaactggctgatgctggcaccgttttgtgtccagtgaccgctgttatgcacacgcggtgccagttcgttgatcaacagaccttgcggggtgacaaaacactccatcgccatcacgcccacatagcccagctcctgcataatcgcgctcagcatctcttcggcttgcgcctgctgctgtgcgttggcctgcggaaaagcgacgctggtgcgcaaaataccgtcctgatgcaggttatgcgtcagcggataaaacacggtgctgccatcaaagccgcgcgcgccaaccaggctcacttcaccagagaagttaatgccctgctcgacaatacattcgccgtaacactctgccggtaactgttcggtttcatttgcgcgtaaacgccattgaccgcgaccgtcataaccaccagtgcgacgcttaacaatcgccagctcacctaaacgatcaaacaccgcaggccactcgctgcgttcggcaagtaactgccacggtgcagtcggcaggtggagcttatcgaaaagctgcttctgagtcagacggtcagcaataatcgggaacacatcgcggttcacaaaggccggatggcgcgccagctcgcgggttaatgcggtttccggccagcgttctatctcagcggtaatcacgctttgttgaaaaggcaccgccgccggttcagcgtccagcccgactggccagacagcaatgcctaacggttcgcctgcctgacgcagcatacggcctaactgcccgttaccgaggacgcaaacctgtttcatgccgcacctcgcgggtccgggttttccagcacttcgtcggtctgggctttgcgccagtcattcagacgctggtgcagttctttatcatgagtcgcaagaatttgtgctgccagtaacgccgcgtttgccgcgccagctttaccaatcgccagcgtacccaccggaatgccgcgcggcatttgtacgatggagtagaggctatcgacaccgctcagtgcggcgctctgtactggcacgcccagcaccggcaccagcgttttggcggcaatcatgcctggcagatgcgctgcgccgcctgcgcccgcaataatcacctgataaccgttctcttcggcgctttcggcgaagctgaacagtttatcgggggtgcggtgagcagaaaccacttcaacgtggtgcgggacattcaggatttcgaagatttcggcggcgaactgcatggtagcccagtcgcttttggaccccatcacgatggcgacacgcgccggattattgcgggaagacatgcgtcttaaaactcctgtggtgcacaactctcggctttagagggcacagagaatagcacggaaagagagcaaggaaaacggttgcgtggctgtgaaatcagcaaagttgcgggttttttaaaacggaaaatgaatcagctcaacgtcatccgccgtgactttcaccatactaccttccgtatgccaggcacccagtaccacgcgaaaagcaggttgctgattggcgataagttcatgcaccgccgggcgatgggtatgcccgtggatcagccattgcacctgatgtttttccatcgcactgaccaccgcgttttggttaacgtccatgatcgccaggcttttactgctgttggcttctttgctgttcgcgcgcattcgcgcggcaatgcgtttgcgcacaaacaacggcagggcgaggaatagcgtctgcagccagggtttgtggaccttggcgcgaaaagcctgataacccgcgtcatcggtgcacagcgtgtcgccatgcataatcaacacccggcgaccataaagttcgagcaccttttcttccggcaataacgtcatgccactttcacgggcaaagcgtttgccgagcagaaaatcacggttgccatgaatgaaataacagggaacgccggaatcggacaccgctttgatcgccgccgccatcttgcgatggagtgggttgggatcgtcgtcgccaatccatgcttcaaacagatcgccaagaatatacagcgcgtcggccttgcgggcttcccccgctaaaaaacgcagaaaaccggcggtgatcgccggttcttccacgcagagatgaagatctgcaataaagagtgtcgccacgattactcgctaacggtcacgctttcaatgataacgtcttcttttggcacgtcctggtgcataccgctacgaccggttgcaacacctttgattttgtctaccacgtccatgccgtcaaccacttcagcaaacacgcagtagccccaaccttgcaggctttcgccagagaagttcaggaagtcgttatcaaccacgttgatgaagaactgtgcagttgcagagtgcggagcctgagtacgtgccattgccagcgtaccacgggtatttttcaggccgttgttggcttcgtttttgatcggttctttggtggctttttgtttcatgcccggttcaaaaccgccgccctgaatcataaagccgttgataacacggtggaaaatggtgttgttgtaaaaaccttcgcggcagtagtccaggaagtttttaactgtttcaggtgctttatcgtcaaaagttttgatgacaatatcgccgtgattggtgtggaaagtaaccatttttgcatcctgttccgtttgattggtgcttcaacccagttcgggtcatatatagggtggtgttatagcataaccgcacgatcggatcatcacgcaatgtatgctgattcgcgcgggaaatatgggtattatacgcaactcaattacccacacatgtctaaacggaatcttcgatgctaaaaatcttcaatactctgacacgccaaaaagaggaatttaagcctattcacgccggggaagtcggcatgtacgtgtgtggaatcaccgtttacgatctctgtcatatcggtcacgggcgtacctttgttgcttttgacgtggttgcgcgctatctgcgtttcctcggctataaactgaagtatgtgcgcaacattaccgatatcgacgacaaaatcatcaaacgcgccaatgaaaatggcgaaagctttgtggcgatggtggatcgcatgatcgccgaaatgcacaaagattttgatgctttgaacattctgcgcccggatatggagccgcgcgcgacgcaccatatcgcagaaattattgaactcactgaacaactgatcgccaaaggtcacgcttatgtggcggacaacggcgacgtgatgttcgacgtcccgaccgatccaacttatggcgtgctgagccgtcaggatctcgaccagctgcaggcaggcgcgcgcgttgacgtggtcgacgacaaacgcaacccaatggacttcgttctgtggaagatgagcaaagagggcgaaccgagctggccgtctccgtggggcgcgggtcgtcctggctggcacattgaatgtagcgcaatgaactgcaagcagctgggtaaccactttgatatccacggcggcggtagtgacctgatgttcccgcaccacgaaaacgaaatcgcgcagtccacctgtgcccatgatggtcagtatgtgaactactggatgcacagcgggatggtgatggttgaccgcgagaagatgtccaaaagcctgggtaacttctttaccgtgcgcgatgtgctgaaatactacgacgcggaaaccgtgcgttacttcctgatgagcggccactatcgcagccagttgaactacagcgaagagaacctgaagcaggcgcgtgcggcgctggagcgtctctacactgcgctgcgcggcacagataaaaccgttgcgcctgccggtggcgaagcgtttgaagcgcgctttattgaagcgatggacgacgatttcaacaccccggaagcctattccgtactgtttgatatggcgcgtgaagtaaaccgtctgaaagcagaagatatggcagcggcgaatgcaatggcatctcacctgcgtaaactttccgctgtattgggcctgctggagcaagaaccggaagcgttcctgcaaagcggcgcgcaggcagacgacagcgaagtggctgagattgaagcgttaattcaacagcgtctggatgcccgtaaagcgaaagactgggcggcggcggatgcggcgcgtgatcgtcttaacgagatggggatcgtgctggaagatggcccgcaagggaccacctggcgtcgtaagtaattgcgctattgccggatgcgagttttcgcatccggttatcgtctgcgccaccacaacattcccatcagtagcatccccggcaaccacacccacatcaattcagaaataatcacctgatgcccgtacggcgtggtgtaacgagacaatgcaaacggcgcgacttttatcacctgccagggagcgaaaaagcgttcatcactccacggccacagccagccaacgcctttaccgccagtggttacgctatccagcaagctgtggcttagcaagctgacggttaaaaacagccagcagcgaatcagcccagccctgaaccatcggcgtccaataaacacacataacagcgggacaacaaacgcaaacaccaggctatgggtaaacccgcgatgaccaaaaacattgccgtaagcaacgccaaatttaaagctcaatacgtcggcgtcgggcagcatcgccaggatgattccggcaaataacagacgcggagggatgactttgctacccaaccctaaaccaatgcataggggaacggcggcgtgcgtaataacggttggcatgatggtcgcttcggcaaaatgtcgatgctatcagcatggatgaacggggcgtagagggcaaaagtctgaaaagagaaccggcctgttgatacaggccgggaaagggatcaggcaacaacctgtacgctgtgacctgcaaaactcactgtctgaccggcgacgattttgcagcgtttgcgcgtttcaaccgcaccgtcgactttcacctggccttcggcaatcgcgattttcgcctgcgcgccgctttcgctccagccttccagtttcagcaagtcgcacagctcaacgtgcggatgtttacctaaagaaaatgtcgccatgttactcatcctgtggatcatgatattcaacgcacgcctgtagcgtgttttcaatcagcgtggcaaccgtcatcgggccaacgccgccgggaacaggcgtaatgtaactggcgcgtttagccgcgtcttcaaacacgacgtcgcccacaactttgccattttccagacggttgatgccgacatcaatcacaattgcgccttctttgatccagtcaccgggaataaagcctggcttgccaacggcaacgatcaatagatcggcattttctacgtgatgacgcagatttttagtgaagcggtgagtcactgtagtggtgcaacctgccagcagcagttccatgctcatcgggcggccaacgatattgcttgcgccaatcaccacggcgttgaggccgaaggtatcaatgttgtaacgctcaagcagcgtgacgataccgcgcggggtgcagggacgcagacgcggcgcgcgctggcacagacgaccgacgttgtaaggatggaaaccgtccacgtctttgtccggatgaatacgttccagcactttgacgttatcaatacccgccggtaacggcagttgaaccagaatgccatcgatggtgttgtcggcattcagcgtatcgataagctccagcagctccgcttcgctggtggtttccgggaggtcataagagcgggagacgaacccgacttcttcacaagccttgcgtttgcttgcgacataaatttggcttgcagggttactacccaccagcacaacggccagtcctggtgcccgcagtccggctgcaatacgcgcctgaactttttgagcaacttcagagcgcacctgctgcgcaatcgttttaccgtcaataatctttgctgccatcagagagaggattccatctgttacgtagatcgaaggggatgcgcctattttgtcagaagcggggcgcgctgtcaggtttcgtttcagatttatcgcgtgaagcgacctcttgcgaaggtgaggcgcaccgtcgctgagactgaaagcttcatttttcgtccatgatggcgttgtaaatctggaactgatttatttccttgtctaaggattaagataatttaagaaatacctgacaatataaaaagaattttcagcctggtaatttaccgcttcaggtctatatttgtgttgaatatattttgcgcggaagtattcatctaacggggctctctattttttagaatagagtgcatattttcaattaagacattcttagaggataaaaaggaatttactactatcagtgtcttaaataaagtaatcggttatatacggatgtggagtcgataaatgagattgaaggaatatatatgaaattaagatttattagctctgcgctggctgccgcactattcgccgctacgggtagttatgctgccgttgtagatggcggtacaattcactttgaaggcgaactggtgaatgctgcctgtagtgtgaatactgacagcgcagaccaggttgtcacactcggtcaatatcgtaccgatattttcaatgctgttggtaatacctctgcattaattccattcaccattcagttgaacgactgcgatcctgttgttgccgctaatgctgccgttgcattttctggtcaggctgatgcaatcaatgataatttattggccattgcatccagtaccaatacaacaacagcaacgggtgtcggtattgaaatacttgataatacatccgcaattctcaaacctgatgggaatagcttcagtaccaaccagaacttgatccccgggaccaacgttcttcatttttctgcacgttataaaggcaccggtacaagtgcaagtgcagggcaagcaaatgctgacgcgacttttattatgagatatgaataatcaaaaccacgttgttttgaattatatatcacgtcttataacaaagtaatgtaccggttgtctgaagcggtatggtggcaatgtaaatcgaaatcatgttcactttgtatcatgccgctttattaaatgaaaagggaatgatgtgttgtaagaaaccaaagcaatcatttctttatattccttatttttgccgtcaggaatacacaaggcgtattaactatgatgactaaaataaagttattgatgctcattatattttatttaatcattagcgccagcgcccatgctgccggagggatcgcattaggtgccacgcgtattatttatcccgctgatgctaaacagactgcggtatggattagaaatagccataccaatgagcgctttctggtcaatagctggattgaaaacagcagcggtgtaaaagaaaagagtttcatcattacaccgccactgtttgttagtgaacccaaaagcgaaaatactttgcgtattatttacaccggtccaccgctggcagcagatcgtgagtctctgttctggatgaatgttaagacgatccctagcgtagataaaaatgcattgaacggcaggaatgttttgcaactggcgattttaagccgcatgaaattatttctccgtccaattcaattacaagaattacccgcagaagcgccggacacactcaagtttagccgatccggtaactatatcaatgttcataatccaagtcctttttatgtcaccctggttaacttacaagtgggcagccaaaagttggggaatgctatggctgcacccagagttaatagtcaaattcccttacccagtggagtgcagggaaagctgaaatttcagaccgttaatgattatggtagtgtaactccggtcagagaagtgaacttaaactaaccgaatcatctgacaatatcagagctaattatgaaaatacccactactacggatattccgcagaggtatacctggtgtctggccggaatttgttatagttctcttgccattttaccctcctttttaagctatgcggaaagttatttcaacccggcatttttattagagaatggcacatccgttgctgatttaagccgctttgagagaggtaatcatcaacctgcgggcgtgtatcgggtggatctctggcgtaatgatgagttcattggtagccaggatatcgtatttgaaagcacaacagaaaatacaggtgataaaagtggtgggttaatgccctgttttaaccaggtacttcttgaacgaattggccttaatagcagtgcatttcccgagttagcccagcagcaaaacaataaatgcatcaatttactgaaagctgtacctgatgccacaattaactttgattttgcagcgatgcgcctgaacatcactattcctcagatagcgttgttgagtagcgctcacggttacattccgcctgaagagtgggatgaaggtattcctgctttactcctgaattataatttcaccggtaacagaggtaatggtaacgatagctatttttttagtgagctcagcgggattaatattggcccgtggcgtttacgcaacaatggttcctggaactattttcgcggaaatggatatcatagtgaacagtggaataatattggcacctgggtacagcgcgccattattccgctgaaaagtgaactggtaatgggagacggcaatacaggaagtgatattttcgatggcgttggatttcgtggtgtacggctttattcttctgataatatgtatcctgatagccagcaagggtttgccccaacggtacgtgggattgcccgtacggcggcccagctaacgattcggcaaaatggttttattatctatcaaagctatgtttcccccggcgcttttgaaattacagatttgcacccgacatctagtaatggcgatctggacgtcaccatcgacgagcgcgatggcaatcagcagaattacacaattccgtatagtacagtgccaattttacaacgcgaagggcgtttcaaatttgacctgacggcgggcgattttcgtagcggtaatagtcagcaaagtagccctttcttttttcagggtacggcactcggcggtttaccacaggaatttactgcctacggcgggacgcaattatctgccaattacaccgcctttttattagggctggggcgcaatctcgggaactggggcgcagtgagcctggatgtaacgcatgcgcgcagtcagttagccgacgccagtcgtcatgagggggattctattcgcttcctctatgcgaaaagcatgaacaccttcggcaccaattttcagttaatgggttaccgctatagcacacaaggtttttatacccttgatgatgttgcgtatcgtcgaatggaggggtacgaatatgattacgacggtgagcatcgcgatgaaccgataatcgtgaattaccacaatttacgctttagccgtaaagaccgtttgcagttaaatgttagtcaaagtcttaatgactttggcagcctttatatttctggtacccatcaaaaatactggaatactagcgatagtgatacgtggtatcaggtggggtataccagcagctgggttggcatcagttatagcctcagttttagctggaatgaatctgtagggatccccgataacgaacgtattgtcggacttaatgttagtgtgcctttcaatgttttgaccaaacgtcgctacacccgggaaaatgcgctcgaccgcgcttatgcctcctttaacgccaaccgtaacagcaacgggcaaaatagctggctggcaggtgtaggtgggaccttactggaaggccacaacctgagttatcacgtaagccagggtgataccagcaataatgggtacacgggcagcgccacggcaaactggcaggccgcttacggtacgctggggggcgggtataactacgaccgcgatcaacatgacgttaactggcagctgtctggcggtgtggtcgggcatgaaaatggcataacgctgagccagcctttaggggataccaatgttttgattaaagcgcctggcgcaggcggtgtacgcattgaaaatcaaactggcattttaaccgactggcgcggctatgcggtgatgctgtatgccacggtttatcggtataaccgtatcgcgcttgataccaatacgatggggaattccatcgatgttgaaaaaaatattagcagcgttgtgccgacgcaaggcgcgttggttcgtgccaattttgatacccgcataggcgtgcgggcgctcattaccgttacccagggcggaaaaccggtgccgtttggaagtctggtacgggaaaacagtaccggaataaccagtatggtgggtgatgacgggcaagtttatttaagtggtgcgccattgtctggtgaattactggttcagtggggagacggcgcgaacagtcgctgcattgcgcactatgtattgccgaagcaaagcttacagcaagccgtcactgttattagcgcagtttgcacacatcctggcagttaaaggaaattatcaataagataatctgcagattattattggcgatggcatgtttgtgtctggcaaacatatcctgggctactgtttgtgcaaatagtactggcgtagcagaagatgaacactatgatctcagtaatatctttaatagcaccaataaccagccagggcagattgttgttttaccggaaaaatccggctgggtaggtgtcagtgcaatttgtccacccggtacgctggtgaattatacataccgtagttatgtcaccaactttattgttcaggaaactatcgataattataaatatatgcaattacatgattatctattaggtgcgatgagtctggttgatagtgtgatggatattcagttccccccgcaaaattatattcggatgggaacagatcctaacgttagccaaaaccttccattcggggtgatggattctcgtttaatatttcgtttaaaggttattcgtccctttattaacatggtggagatccccagacaggtgatgtttaccgtgtatgtgacaagtacgccttacgatccgttggttacacctgtttataccattagttttggtggccgggttgaagtaccgcaaaactgcgaattaaatgccgggcagattgttgaatttgattttggtgatatcggcgcaagcttatttagtgcggcagggccgggtaatcgacctgctggtgtcatgccgcaaaccaagagcattgcggtcaaatgtacgaatgttgctgcgcaggcttatttaacaatgcgtctggaagccagtgccgtttctggtcaggcgatggtgagcgacaatcaggatttaggttttattgtcgccgatcagaacgatacgccgatcacgcctaacgatctcaatagcgttattcctttccgtctggatgcagctgcggcagccaatgtcacacttcgcgcctggcctatcagtattaccggtcaaaaaccgaccgaagggccgtttagcgcgctggggtatttacgcgtcgattatcaatgaggtacggagaatgagaagagtactctttagctgtttctgcgggctactgtggagttccagtggatgggcagttgaccctttaggaacgattaatatcaatttgcacggtaacgttgttgatttctcctgtaccgtaaacacagcggatattgataagacggtagatttaggcagatggcctacgatacaactactgaacgctggcgataccacggcactcgtcccttttagcctgcggctggagggatgtcctccgggtagtgttgcgattttatttacgggaacgccggcatccgataccaacctgctggctctggatgatcccgcaatggcacaaaccgtcgccatcgaattacgtaatagcgatcgctcccggctcgcactgggggaggcgagcccgactgaggaagtagatgcaaatggcaatgtcacactaaacttttttgccaattatcgagcgttagccagcggtgttcggccaggtgtggcgaaagcggatgcgatatttatgatcaattataattaatattatattaattcgtataatttggcgtagtcgataagctctacaatactatgcaaacctagcttgccataaatattagatttatgcgcactaactgttttattgctaagtaataacttatcggcaatttctttattagataatccgctaaccagataacgtaatatggtcacttcacgattagatagcacagtgaccgtactactattcgtactacatttattgctttttatatagttaagcgtttcgctgggaaaaaacgtgtatccggagaggatcatctgaacggcatgaaaaatatcattctgatcattgcatttactgacaaaaccgttagcaccagcttgtatcgctctgccagcataaaagcattcacttttgctacttaaaaataacactttcactgtgctctggatttgtttgatccttttcaggaaggtaaaaccgtctgttccgggcaagtctatatccataatgattaaatcaacaggacgggttcggagataatcgatggttatgcgataatcatccgttttcaggacaatctgcaattcactgtttttttgcaacagaacttcaatagacattctgatgataggatgagtatccataatgatcacgctcgttggtttcatagttaccagtctcataggagcggacaattttccgttaggtcgggaaattgtactttgatacatgaaaatacgggttttcttgattcagacgcgcagcggtgtgcgtttgtttgccgctatagcgaaataaatcagaaaatcagacgcggtcgttcacttgttcagcaaccagatcaaaagccattgactcagcaagggttgaccgtataattcacgcgattacaccgcattgcggtatcaacgcgcccttagctcagttggatagagcaacgaccttctaagtcgtgggccgcaggttcgaatcctgcagggcgcgccattacaattcaatcagttacgccttctttatatcctccataatttcagagtgggacatatttgggacattatcaccaaaaatgtcgtctattttcctcgcatgctctgtcaaatgattaggcgcaaggtgagcatacctacgaaccatttctatggactcccatccgcccatttcctgaagcactgataatgggacgcctgactgaatcagccagcttgcccaggtgtgtctgaggtcatggaaacggaaatcttcctcatttatgcccgtcttatccgtttccgctttgcccttcaccacatcactttttgtcgctgtttggcgagataattcaacggtgtcaggccgtaaaacgccttaaaaacagagataaagtagctcgtgctgctatagccacataattgcgccacctgagtgatatttttgttatccatcaataacatctgtacggcgtaacgcatacgacactctgtgacaatctggctatagctggtattttcgttttttaatttctttttgagcaggctggggcttaaacataggctactggcgacaattcgcagattccagtaatgctgaatatcgctttgaataatgcggcagacgctgtcgcggacgctgctgcgtaagatatacatcagtagggcaataaaccggctttgctcaagaaagttagacaatacggtaaaaagcaatgcgcgcgtcaactccgcttcgcagggtctgctgggttgctgcttgctgtggttggcggctagccggaacacttccggtgtacggctatgacaagcgataaccggggttgccagccggctccagggctttacacaggttaagttcttatttaaaaacaacagataatcgttgatgatgttacggttgatgtgggtgattaatacgtgatttaacgtactgagttcaatgacgttattgttgcacgcgaaggcggccaggtagtttttcggaagggtaaacgtagcatggttattgacgcttacctctacctctttttcggtcaggatcaccacgcaaggttcactgctgctcaattgcatttcgcactcctcagatatcagaaactccgctcaaaggatctatgcttcctgcatgagtgatcggcccgttcgccgataacgatcttctttctttagcacgctttttagcaattaatcttgatggaattctgatgagagcgaaagaggtaagccaggtcgtacccgacttacctggaggagatttaatactcgagaatgccgtgcgcgacgggcaaatagcgcagagagaaatagagagtgtctttaccgcaagaggaacgtttcgctaacaggctggcaatttctgcgtccggtttcggtttcgctgtaaaggttttgcctttgccggcgacaaaaagttcataaacaacgccgctggcaggggcgggactttggcaatcggcgctggcctgtaaataacgttcacgctgttcagcggtcagtttatccacgccgctgccatcctgtacccagacattaacgccggttgctttaacgtgttccagcagttggcgatagccatcggggctcatgtttccggcgaaaaaactactgatataaaccggttttgcactaacatcgctaatcagccgctgcgcgttgtttaaccatgttagcaaaggctgacgggcggcttcgctgcgccagttcaggtcgtcaatttccgcgctgatgtaccagccatccggcgttatgccaggcgcggcgctccataatctggcttgctggagatcggcagccagcaggcgattaagatagctttccagcgctgcggagctctgtttctggtgcataaaaaattccggatcggcgttcagcccgacaataagcttcagaccagcctgttgcgcagctgcggcccgcttaaacaataacgtgcgctgttctggctgggtaaatgcatcgccgtaacgggtccattgcaaaacaagggtatcgaagccttgcaaacgtaactgactcatcagcccctgccactgggtatcggtaacctgactatctcggttttgtggttgccagataatacctttcatcgcaaaggaaaaagggctgaccaaaagcagtgtcagcaatacgaaaatgaacttacgcatttaccagtgcactccaatggtgagaaacgcgttgttgcgctctccgttacgttgattaatcgccttaaaggtatgttgatactcgacgccgagactgactttgtgcggccaggcgtcgtagtgcgtctcgccggtccagatattccagcggaccccgactccgccaagctgcgcgccctgagtgcctttatcacgatagccgttgtcctgaacgtgagcgtaaggctcaatagtctgtccgttagctaccttctgatgccagctgacgcgataatctgccgtccacgcctgaatatcctggcggatatattgcgccgcatcgaggtacaggttttgggcaaaccagccactaccgttcgggtgccattcgtcgctgtatttgccgccattaaagaaactggcgctggcgcgcagcatggtatcggatgcgccattttggccgttcagcggcaactgctgttcgacggcgatgaaaaagatctgatcgcgcagcggcttccagcgcagaccggtgccggacatcggatttttcaccggcatcatcaccccgttttctccggtatcggcaaagacgcggctataaacactgagcaggtcgccttccagcagcatattgcgtccgatgcggtactcggcttccagttgtccgtagctacgatagcttttccctggcgctgcgccgccgacattattgttagcggtactcattgcgccggaacgcaagccgatggaagaatcgaaactgaacgtccagcggcgaccgacctcctcatgcaaacggcggaaattgaagcgttgttgattttgttctggggtcagtggggttatcagcgcctgattatcaatgtcatcaatcaccagccgggcgtagtgctgcgtcgcaggcatgtcatccagacgctggttcacgtaggccagttgtcggatcagtgccggatcgtccggaagccctttatgcgccggttcgagcatttcccggctctgtgcgatatcaccgctatcccacaaggcgtaaccaagcgctgcctgggtgttgctattattcggttccagttccagcgcggcgcgcaaatcactcaccgcggccgggacattatgacgttggcgataaattgtcgcccgcgcaacgtaagcgttggcagaaggcgcaatattgatactgcgcgtgagatcgttcagtgcgagttccggctgaccaggaatgtaacgttgcgcatgcagccaccagtagagggcattgcttcccagtccacgtttttctgcctgttgtagccagcgatcgcgagccgcaccatttcctgccgcctgggcggtattggcagcagcaagcagatcctcattgctcatgtcgtgaagactgattttctgccaggccgccagtgcggtggcgtagtcctcaacctgatacgcctgataggctaccgcacgatgttgccaggcgctcggttgtcgttgttcggcctgaagccatgcatacaacgccacaccgggtagcgtgtcccgataacactttgccagacggttccaggcggcggcatcgtaggaagggctcatatcgcccagcaagcgaactattgccgggcaattatctgcaatacccggcaactgactttgccactgacgttgctccgccagcggtaagggtttgcttaaaatcgccaccttcgccggcgttgccaggtaaggatgactttccagcagagacgccagtcgcgccattaaagtctggctgacacgcgcatcgccctggaaaggatagcgttgcagcaataaatcggcagcttcgcgactctgctcgttctgcatcagttgccaggttagttgatccaggcgggtaagatttgccggttcttgctgatacagcaatcgtgccagacgcagagcttcagccttgttacgggtcgccacgctgacagcataacgctcctcaagcatttcattggcggggagggtggcgagcagtttttgcgctgcgtcgtactgaccttcttttaacagcaccggtagcgtcgcgccaacaacatactggcggttgtcggcaaactgtaccgtataattcgccaacgcctgaacggggttagcgctgtatttagataacagatagagccaacttttctcttgtgcgtccgtggtaaatagtggcttattttcaatgagataatgctggaggcgtgctttttcgccacgataagccagcgcggtcgcgtaagtaatataactctgaggatcggtgaagatcccctgactttgcagtgccaggatccgatcgtccagctgcccggcaagaagcacgtcaaaccactgacggcgttctgccgcgcttaatgtgttctgctggcgtgcttcattgtatagcgtatctgcctgggaccattgtttcaggtagattgcccgttgcagcagatcggttcgcagcgtttttccttccgggcttgcagcaaacgtcgcatcgttcagttgcgctctggcgacaggtaactgtgccagccgcagggcattctgcccgacttcactgcgacaacgcagggtcggcgcagcatcgcacgctttttgctgggcaagcagttcttcaactgtcgtaacgcttttcacttcaaccggaatagccgccagactgcgctcaagtcgggcatctcctgggtgacgtttcagttgatcctcaagcaacagccgcgcccggtcatcatgaccaaaatggcgataggcttccgcaaggtataaagtcagcggaatattatccggcacctgctggtgtatatattcaaattcgcggatggcggttgcttcgtcgttatttttctgtgccttcagcgctttatcgagacggggataaataacaaaatggcgataatcgctcagccccagctcttctgcgctggtgccgatattgtctgcgagtgcgctggtactcaataaagacgtcagcagtaaaccagaccatccgatgacgcgattaaggttattctccttcattttcggactccagttgcgcaacctgttctgtgtttaaacctgctttgagtaatagactttgcatgctaacttgtaattcgcgttgaattgtcaggacgcgatccaacgtttcctggctgataacgccttcggtgaccaaaaacttgccgagcggcagagaactgcgttcatggcgcaataacaacacgttaattgcactacgattaatatgaccgagcgtggtcagtatttcggcgaacaggaactgatgcggcacatattgccgccagatttcaccggcctgctgttccgtgagccactgatgctgaaccgcattgtacaacattgcccgcggatcgtgaccgcgtcggcgtgcataccagtgacgtaaccctgtgacaatttgtccccgcagaacaatgacgtaacgcactttgcgtccgactttacgcgtcagggccgccaggctaaccgggtcaataccatcttcactgccgacaattaactcgtcattttccagacgcagcggcagtaccgcataatgcagcgccacggaggccggcatttcggcaatcaggctggaagggatctgccaggcatcgatggattcccacgccacgccgttttgctctgccagcgcctgtgccagctgctcggcgctaatcagcccctgcatcagcatactaccgcccaggcgtagaccttcgacgcgattacgcagtgctgtatcgagttgttcttcagtgatgacctgattttccagcagaatttgacctaacgggcgcaagctgcgggtatcgccagtcacgctggggaagtcatgcgttgttttatcccacgccacgcgacgtggatcgccgtgttgaagtacctgttttagcgcgcgccagttggccatgaagttaatcaggttgccccagaaaagacgcaggacggaaagcagcccctgcgtcaggccgtagtagccagtaacgaaaatcacccgctgcacgatgcggttaaccatcaaaccaaagtttagccacagcagggtcattaaccatgcgctgccgctgaaaatagaaaggaaatgccaggcatcgggccacaaactttcatacgccagcaacagcaaaagctggatcatcaccagcatcgcgaggaagctgacaaagttactgattgcccctttgcggtcgcgccagagaaagtagttcagcgtcaggctggaggtccatttatgggttttaaagccttggaaaacaatgccgatgatccagcgggatttttgtcgaaccgcagtgctaaaggtatcggggaaatattcgcgcacgcagatcatgttacttgtccgcgcgtgctgtaaaaatttacgctgctcgcgttctttggcttcgtccaccaccggaaaacggacaaaaatttccgtcatacctttttctttcaggcggaagccaatgtcgtaatcttcagtaagactctgcacgtcgaaagcaataccgtcaccgtcagctaacagtgcggtcacggcgcggcggctgaaacaggtgccgacgcctgcgctgggcacttgtccggcgagggcttcacgcaccggaacatctttgccatgcagctcactaaactcatcaatgtaagtcatgctggtgaagtgcgtccattcgcgttcgaacggatacaccgggatctgaatcagatctttacgctcgaccagatagttgaacagacgcaattccatcggactaatcacatcttcggcgtcatgcagaataaaaccagcaaaagcgaaattggcgctacgctcaaattgggtgatggcgtccagcacgttgttcagacagtcggctttgctggtggggccaggacgcgcgcagactaccttatgcacattcgggaagcgagcgcacacttcgtcaacatcacgctgagtatcggggtcgttggggtaggtgccaacaaagatatgatagttttcgtagtcgagcgtggtcgccgccagctcggccatattgccgatgacgcccgtttcattccacgccggaaccataatcgctaacggtttttcatctggtttatacagttcgcggtaactcattcgcgggtagcggcgataaacactcaacttgcgtttaatgcggcgtacccagtagacgacatcaataaaaaaatcgtccagcccgctgatgaacatgatgaccgctaacgttatcgcgattacttttaagccgtagagccaggtagcaaaaacatcaagaagccagtccacacaaaaaccttacattaacgctggttatgtttagggtggcgtatattaaggttttttatgaattgtgacagctttttaccattaataggtatgactattgcggcacgttatttttacactggttataaaagttgccgtttgctgaaggattaagcgggtaatgtgataacaaaccttgtcccccgcgcatcgctcgttaccgcaaccgtgcctttatgcgcgacaacaatgcttttcactatcgccaggccaataccgctaccttcaccttttcgctggcgggaggggtcaacgcgatagaaacggtcaaacaatcgcggtaagtgctcgggcgcaatgggcgtaccggggttttcgacgataacttgcaccaggtgatcgaccgtctgacagcgcactacaattgtctctccggttggcgtataacgcagggcgttgctaagcaggttgcttagcgcccgacgcagcatcagcggatcgcccgcgacctgacacttgtcgccaacaaaccgcaactccacgccgcgatcttccgctaacgcctcgaaaaaatcgaacactttgccgacttcatccgccaggttgagcattttcttttcggggattagctggttgttatcggcctgagcgagaaacagcatatcgctgaccattttcgccattcgcgtcagctcttcgagattagagtagagcacatcttccagctccttctggctgcggctctggctgagggcgatttcggtttgcgttatgagattcgtaattggtgtgcgaatttcgtgagcgatatccgcactgaaattggactggcgggtaaagacatcctcaatacgctcgatcatatggttgaagctcagtaccagctgttccagctcaatgggcacggtctgcgggtcgaggcgaacgtcgagatctttgctggtaatattctggatttgacggctgacgctgcggatcggcgcgtgacctttatgtaccgccaacagtacgataaagacgatcaggatgctgattacgcttgcggtcataataagtttattcatcaaatcatttatgtaatgaagatgaaaatcgatgctaagcgcgatgtagagcgtataaatcggtttgccgtccaccaacgggccaaccggcaagttaatcatccgccagttgctgtgttccatatgcccgtgaccgtggcctggcatcatcatcgtcgggccggaaaggagatacacctcgccaccctgagcgtctttatcgggtatggcgtcacgcgtaaactcgcggatatccggcgcaccgggggagtgatacaccgttttaccctgactatctgccagggaaatcaacacattggaataaccactgacgatatcttccagcgtcattaagcgtcgggcttgcgtttcgtcagggtgatttagtacccgttcaagggtggcgctaatctcttttaaatcattaatatcctgctcggcaaaatgaacttttacactgtggatcatgatccatgcaaaggcgaaaaacgccgcgatggtggccaggctgataaaaaaggtcaggcgggttgccaggctaaacgggcgctgaaatggcttactgaccatccggcacctcaagcatgtaacccacgccgcgcacggtctgaattagcttcggctcaaagtcgttgtcgattttgccgcgcagccgcttcaccgccacatcaatagcattggtatcgctgtcaaaattcatgtcccatacctggctggcgataaggctgcggggcagcacttcgccctgatggcgaaggaagaactccagcagagtaaactctttactggtcaaagtgatgcgcgtgccgctgcgggtgactttgcggctgacgagatcgaccatcaaatcggcaacctgaaactgactttcgataatcaccgccgccccgcgccgcagtaatgtgcgcacccgcgccagcagttcagcaaaagcgaatggcttcaccaggtagtcatctgcccccaactccagccccttgacgcgatgttcaatggtgccaagcgcggtaagcaacagaatcggcatccctttattggcggagcgtaacatgcgcacgatatcccagccgttcacgtccggcagcataatatcgaggattatcagatcataatcaccggtcatcgccagatggtagccattcagcccgttgtcggccaaatcgaccacaaaaccggcttcggttaaccctttggtcaagtattctccggttttcttttcatcttcgacaatcaacagtttcatatttcctccgcatgttgcccgggcaattctagagtagcgggatcagatggcaatcgcttattggcaaaatgacaattttgtcatttttctgtcaccggaaaatcagagcctggcgagtaaagttggcggcataaaatcaccagaaattatgagcctatgtctccttgtaaacttctgccattttgtgtggcccttgcgctaaccggttgtagtctggcaccggattatcagcgtccggcaatgcccgtgccgcagcagttcagtctcagccagaacggcctggttaacgcagcagataactatcagaacgcgggctggcgcaccttttttgttgataatcaggtgaagacgctgattagcgaggcgctggtgaataatcgggatttgcgcatggcgacgctgaaagtgcaggaggcacgggcgcaatatcgtctgaccgatgccgaccgctacccacagctcaatggcgagggcagcggcagctggagcggtaatcttaaagggaataccgccacgacacgggagtttagcaccggccttaacgccagctttgacctcgattttttcggtcgcttaaagaacatgagcgaagccgagcgacaaaattatttagccactgaggaagctcagcgcgcggtgcatattctgctggtttctaatgtcgcgcaaagctatttcaatcagcaactggcgtatgcgcaattgcaaatagccgaagaaacgctgcgtaattatcagcagagttatgcgtttgtcgaaaaacaactgttgacaggtagcagtaatgttctggcgctggaacaggctcgcggggtgatagaaagtacccgcagcgacatcgctaaacgtcagggggaactggcgcaggcgaataatgcattgcaactgttgctgggaagctacggcaagctgccgcaagcgcagacagtaaacagcgacagcctgcaaagcgttaaattaccggcgggattgagcagccaaatcttattgcagcgcccggatattatggaagctgaacacgcgttaatggcggctaatgccaatattggcgctgcacgcgcggcattttttccgtctataagcctgaccagcggaataagcaccgccagtagcgatctaagcagtttatttaacgccagcagcgggatgtggaattttatacccaaaattgagatccccatttttaatgccggacgcaaccaggccaatctggatatcgccgaaattcgccagcagcagagcgtggtgaattatgaacagaaaatccagaacgcctttaaagaagtggcagatgcgctggcattacgtcaaagcctgaacgatcaaattagcgcccagcagcgttatctggcaagcctgcaaattactttgcaacgggcgcgggcattatatcagcacggcgcagtaagttatctggaagtgctggatgccgagcgttctttatttgcaacccgacaaactttacttgatctgaattatgcccgtcaggttaacgaaatttctttgtataccgcacttggtggcggttgacagcaatatactcgtcatacttcaagttgcatgtgctgcgtctgcgttcgctcaccccagtcacttacttatgtaagctcctggggattcactcgcttgtcgccttcctgcaactcgaattatttagagtatgacttttaactccaggagagaataaatgaaaaaagcactgcaagtcgcaatgttcagtctgtttaccgttattggctttaatgcccaggctaacgaacatcatcatgaaaccatgagcgaagcacaaccacaggttattagcgccactggcgtggtaaagggtatcgatctggaaagcaaaaaaatcaccatccatcacgatccgattgctgccgtgaactggccggagatgaccatgcgctttaccatcaccccgcagacgaaaatgagtgaaattaaaaccggcgacaaagtggcgtttaattttgtccagcagggcaacctttctttattacaggatattaaagtcagccagtaacccaggtttaatgagatgaaaaaaatcgcgcttattatcggcagcatgatcgcgggcggtattatttctgcggcaggttttacctgggttgcaaaggcggaaccgcctgcagaaaaaacgagcaccgcagaacgtaaaatcttattctggtacgacccaatgtatcccaatacgcggttcgataaaccaggtaaaagcccgtttatggatatggatctggtgccgaaatatgccgatgaagagagttctgcgtctggtgtgcgcattgacccgactcagacgcagaatctgggggtgaaaacggctaccgtcacgcgcggaccgctgacttttgcccagagtttcccggcgaatgtcagttacaacgagtatcagtatgccattgtgcaggctcgcgctgccgggtttatcgacaaggtgtatccgcttaccgtgggcgataaagtacaaaagggcacaccgcttctcgacctgaccattcctgactgggtggaagcgcagagtgagtatttactgctgcgcgaaaccggcggtacggcgacccagactgaaggcattcttgagcggctgcgactggcgggaatgccggaggcggatattcgccgcctgatcgccacgcaaaaaatccagactcgctttacgctcaaagcgcccattgatggcgtgatcaccgcgtttgatctgcgcgcgggaatgaatatcgccaaagataacgtggtagcgaaaattcagggtatggacccggtgtgggtcactgctgcgatcccggagtctatcgcctggctggtgaaagatgccagccagtttaccctcaccgttccggcgcgaccggataaaacactcaccatccgcaaatggacgctgctacctggcgtggatgccgcgacccgcacgctgcagctgcgtctggaagtcgacaacgccgacgaggcgctaaaaccgggcatgaacgcctggttgcaactcaacaccgccagcgaaccgatgctgctcattccgagtcaagcgctgattgataccggcagcgaacagcgggtgattaccgttgatgccgacgggcgctttgtaccgaaacgcgttgctgttttccaggcaagccaaggcgtcaccgcattacgctctggtctggcggaaggtgaaaaggtggtttccagcggcctgttcctgattgattccgaagccaatatttctggcgcactggagcggatgcgctctgaaagtgcgacccatgcgcattgagggaataaccaatgattgaatggattattcgtcgcagcgtggcgaaccgttttttggtgctgatgggcgcgttgtttctgagcatctggggcacctggaccatcattaatacgccagtggatgcgctgccggatctctccgatgtgcaggttattattaaaaccagctatcccggtcaggcaccacaaatcgttgaaaatcaggtgacttatccgctaaccaccaccatgttgagcgtgcctggcgcgaagactgtgcgcggtttcagtcagtttggcgactcttatgtgtatgtcattttcgaagatggcaccgatccgtactgggcgcgtagccgggtgctggagtacctcaaccaggtacagggtaagctgcctgcgggagtcagcgccgagctggggccagatgccacgggtgttggctggatctatgaatatgcactggtggatcgcagcggtaagcacgatctggccgatttacgcagtttacaggactggtttctcaaatatgagctgaaaaccatccctgacgttgcggaagtggcgagcgtgggcggtgtggtgaaagagtatcaggtggttatcgatccccagcgcctggcgcagtatggcatcagtctcgccgaagtaaaaagcgcgctggatgctagtaaccaggaagcgggcggtagcagcatcgaactggcggaagcggaatatatggtgcgcgccagcggctatctgcaaacgctcgacgactttaatcacatcgttttaaaagccagtgaaaatggcgtgcccgtttatctgcgcgatgttgcgaaggtccagattggcccggagatgcgccggggcattgccgaactaaacggcgaaggcgaagtggcgggcggggtggtgatcctgcgatccggcaaaaacgcccgagaagtgatcgccgccgtgaaggacaaactggaaacgctgaaaagtagtctgccggaaggcgtggagatagttacaacatacgatcgcagccagctcattgaccgcgccatcgacaacctcagcggcaagttgctggaagagtttattgtggtggcggtagtctgtgcgctgtttctctggcatgtgcgcagcgcgctggtggcgattattagcttgccgctggggttgtgtattgcttttattgtcatgcacttccagggactgaatgccaatattatgagcttgggtggcattgcgattgccgtcggggcgatggtcgatgctgctatcgtcatgatcgagaatgcgcataaacggctggaagagtggcagcaccagcatcctgacgccacgctggataataaaacgcgctggcaggtgatcaccgatgcgtctgttgaagtggggccggcgctatttatcagtctgctgattatcacgttgagctttatcccgatcttcaccctggaagggcaggaagggcgtctgtttggcccgttggcgttcaccaaaacgtatgcgatggcgggtgcggcgctgctggcgatcgtagtgatcccgatcctgatgggctactggatccgtggcaaaattccgccggaaagcagtaacccgctcaatcgctttttgattcgtgtttatcatccgctgttgctgaaagtactgcactggccgaaaaccacgctgctggtggcggcgcttagcgtgctgacggttctctggccgctcaataaagttggcggggaatttttaccgcagatcaatgaaggcgacttgttgtatatgccaagcacgctgccggggatttccgcagcagaggcggcgagtatgctgcaaaaaaccgacaagctaattatgagcgtacctgaagtggcgcgggtatttggcaaaaccgggaaagcggaaaccgccaccgattctgctccgctggagatggtagaaacgaccatccagcttaagccgcaggagcagtggcggccaggcatgacgatggacaaaatcattgaggaactggataacaccgtgcggctgccggggctggcgaatctgtgggtgccgccaattcgtaaccgtatcgatatgctcagtaccggcattaaaagccccatcggcattaaagtttccggcactgtgctggcggatatcgacgcgatggctgagcaaattgaagaagtagcgcgaacggtgccaggcgtagcttctgcgcttgccgagcggctggaaggtgggcgctatatcaacgttgagattaaccgtgaaaaagccgcacgttacggtatgacggtggcggatgtgcagttgtttgtgacttctgcggtgggcggggcgatggttggcgaaacggtggaagggattgcccgttatccaattaatctgcgttatccgcaaagctggcgcgatagtccgcaggcactgcgccagctgccgatcctgacgccgatgaagcagcaaatcaccctggcagacgtggccgacattaaagtctctaccggaccgagcatgctgaaaaccgagaatgcgcgcccgacgagctggatttatatcgatgcccgcgatcgtgacatggtgagcgtggttcacgatttgcaaaaagcgatagctgaaaaagtgcagttaaaaccgggcaccagcgtggcattctccgggcagttcgagctactggagcgcgccaaccataagcttaaactcatggtgccgatgacgttgatgattatcttcgtgctgttgtatctggcgttccgtcgggtgggcgaagcgttgctgattatcagcagcgtaccgtttgcgctggtgggcggcatctggttgctgtggtggatgggctttcatctttccgtggcgacgggcactggctttatcgccctcgccggggtcgccgccgaatttggcgtggtgatgctgatgtatttacgtcacgccatagaggccgtgccgagcttgaataatccacaaacattcagcgagcagaagctggatgaggcgttatatcacggcgcggtcctgcgcgtgcgcccgaaagcgatgacggtggcggtgattatcgccggtctgctgccgattctgtggggaacgggggctggtagtgaggtgatgagccggattgccgcgccgatgattggcggcatgatcaccgcacctttgctgagcctgtttattatcccggcggcgtataagctgatgtggctgcaccgacatcgggtacggaaataaaagcaggataccccgtttaaccgtgtggattgtgtcttgcgacgatgggcactaaatgttaaaaggtgcccctcaacaaaaaagacacacaggggaaaggcgtgaaaaacgcgagtaccgtaagcgaagatactgcgagcaatcaagagccgacgcttcatcgcggattacataaccgtcatattcaactgattgcgttgggtggcgcaattggtactggtctgtttcttggcattggcccggcgattcagatggcgggtccggctgtattgctgggctacggcgtcgccgggatcatcgctttcctgattatgcgccagcttggcgaaatggtggttgaggagccggtatccggtagttttgcccactttgcctataaatactggggaccgtttgcgggcttcctctctggctggaactactgggtaatgttcgtgctggtgggaatggcagagctgaccgctgcgggcatctatatgcagtactggttcccggatgttccaacgtggatttgggctgccgccttctttattatcatcaacgccgttaacctggtgaacgtgcgcttatatggcgaaaccgagttctggtttgcgttgattaaagtgctggcaatcatcggtatgatcggctttggcctgtggctgctgttttctggtcacggcggcgagaaagccagtatcgacaacctctggcgctacggtggtttcttcgccaccggctggaatgggctgattttgagcctggcggtaattatgttctccttcggcggtctggagctgattgggattactgccgctgaagcgcgcgatccggaaaaaagcattccaaaagcggtaaatcaggtggtgtatcgcatcctgctgttttacatcggtagtctggtggttttactggcgctctatccgtgggtggaagtgaaatccaacagtagcccgtttgtgatgattttccataatctcgacagcaacgtggtagcttctgcgctgaacttcgtcattctggtagcaagcctgagtgtgtataacagcggggtttactctaacagccgcatgctgtttggcctttctgtgcagggtaatgcgccgaagtttttgactcgcgtcagccgtcgcggtgtgccgattaacagcctgatgctttccggagcgatcactagcctggtggtgttaatcaactatctgctgccgcaaaaagcgtttggtctgctgatggcgctggtggtagcaacgctgctgttgaactggattatgatctgtctggcgcatctgcgttttcgtgcagcgatgcgacgtcaggggcgtgaaacacagtttaaggcgctgctctatccgttcggcaactatctctgcattgccttcctcggcatgattttgctgctgatgtgcacgatggatgatatgcgcttgagtgcgatcctgctgccggtgtggattgtattcctgtttatggcatttaaaacgctgcgtcggaaataaggcattcacgctacatccgacaaaacgatgtcaaccatccgaaaccgctctcatccattcgatgagagcggtttttttaattactgcttaaatgcacccgccagagagcgaatatcattgccggttggcgagtaatccccgcatatccggttgtcaggtcaggatggtaaggcacctgctttacactttcgcccgtggtcagtgatggctgcgggcgaatcgtaccagatgttgtcaattaatcgtgttggcacagcgttatgactatcttttcttttatctgccagtgcacagcaaacatctcattctcacgatgaatgatgacctgctgtttattccagctaattatctgatagtccagaaaacctgcatcagtttggatctcacttgccttaaatgcgctctctttggcggaaaatgccagtgtcagcgccagagaaaaggctaaaccgcagtctgcgagtcgctcgtgttccgctggtgtaataatgttgtctgtcaattctcttgcggtttgtacagaaaaaatttcttctatatcaatgccaatcggttgacgagataccacggctaatgccgtagtcccacagtggctaatactgccgtatacctccgcaggccagacaggttggcgtagctcgccgattgcgggcacacatttatagccatattcccgcaaagcataaacagcagcgatccgtccggctaaatgctctgttttacgtttacgtccagcgtgttgcagttgtgcgtagtgcggcagccagagtaaatcctgctcacaaaaattcgccggatcgaactcaacaaaatgcagcgtatgtccggcaaaggggagggaggtatgcgtagttttcatatcgaccatattcgagactgatgacaaacgcaaaactgcctgatgcgctacgcttatcaggcctacatggtcctgcaatatattgaattggcaagatttttgtaggccggataaggcgttcacgccgcatccggcatgaacgacgcgcactttgtcaacaatctgacgttagcatcagaagtgggtgtttacgctcatataccacgtacgtcccggctcgttataggtatacgccccggcaccggcgatatagttggcccctgccgaatcgcccgtggtctgggcattacccgcacgccacaaacgtttgtcgaacagattgtccacgccgccggtcagactgacattcttcgtcacatcccaggtcgcgctcaggccaacaatgctgtaaggactaatttctttggtttccggtccaaccgctggctgacctttatagttgtacttcttcggctgctgcttgccgtaccaggtgaaggtcgtttgcatgctcaaatcttcccgtgcctgccagctcagcgtactgttcaacgtatactccgggatgatgctcaaacggtcgcccgtggttttgttttcactcttcagcatataagtgatgttattggtccacatcaccgtttcgctaaccggtacgtttaagcttccttccagaccttcaaccaccgctttcggcacgttatcccactgatagagatcggtgccgactgcgttttgccctacagccacatagcccgcttcaatcttattgcgataatcgttacggaaccaggtgacgcccgccagccacccgtcgcgtttgaactccagaccaatctctttgttgatgctggtttctgctttcaggtcatcgttaccttgcagatagcagccgcccgcgctggcatagcaaccctgacctttactgtagagaatgtagttcgggttagtctggtacaggctcggcgctttataagcacgggcgatgcccattttcagcgtgaagtcatcgcctaaaccttggcttatgttcagcgccgggctccagttattgccgacaatactgtgatgatcgaaacgcagccccggcgttacgatggtgctgtcagtcagctccatgttgttttcggcaaacaggctgaaaatttctgctttactatacgggctacggtcggtggtactcacgccatcaatagcgccaccggtattcgttccggtcagtgcctgggtgttggaacttaagtccttcatccgttgctgattccactccgtacccagcgtcagcgtctggttaacgaggaaatcaatcggcaggttaacttcgctgtgcagcatcacgtcatcaagatcgatatcgacgaaatcctgtgtcgctttttcgttaaatttcccttcggtaccgcccgccagaccttccggaatacggctgttacgggtgtgttcgtactgcacccagttgctggtggtcacgccgttatcccagccaccgttccaggtcagcgcgtagttctggcgatacagacggttggtttcatcgccatatttgctgcgggtataggaatcggagttggtattctgggtgtcgcccgcatacaggttaccctggcggctgtaacctgcttccagttccaggctttgcaatggcgcgaaatcccagcgcaccacgccattaatatctttgttgattaccccttcgcgcccggctggtaacgtcgtggcatacgttccggcacgcgcggactgatggccctggttgatatcccacgcgtcagcctgggttttgtcgaggttgccatacaaacggaagctgaattcgtcgcccagcggaccggtcaggctaaagttagtgcgtttggtggcaccttcctctttatgttctggcgcattgaaatatgcgtcccaggagccgtgccactcgccgctgccttttttggtaatgatgttaaccacgccgcccgccgcgccgttgccataacgcgcagctgccggaccacgcagaacttcaatacgttcaatcatttcaggtggcacccaggaagtatcaccacgggtatcgcgctcgccacgccagccctgacgcacgctgttacggctgcttaccggcttgccgtcaatcaaaatcagcgtgttttccggacccataccgcgaatatcaatctgtcggttattcccacgctgaccactggtggagttaccggtcaggttaacgcctggcatggtacggatgatcttgctcacatcgcgggcaaccgggtttttgcggatttcatctgcggtgatggtgctaacgccaggcgcctgtaagttctgctcggcggcggtaacgacaatagtatcgtcatgactaacaggagtatcggtcggctcttgtgcctgcgctaccccataaatccccagattgaccaacaaggccagggaatgaatcttcttgttcattgttttattcctgcatttttgccacgaattgcaactgtcgggcatggtcgtcatcaacacgacgcatcccgctaccgcgaaaacctttgatcctgaaagacacgcagtgcagttggttaattaatgtccgcgcttcccacggcgcgccattacgctattgcaaatgcaaatagttatcaataatattatcaatatatttctgcaatcaatgaaaaattgcacagtaaacatggggttatggtgtgacggcgttaaaagtaggaagtgagagctggtggcagtcgaaacatggcccggaatggcagcgtctgaatgacgaaatgtttgaggtcactttctggtggcgtgatccccaaggttctgaagaatacagcacgataaagcgcgtatgggtctacatcactggtgtgaccgatcaccatcagaacagccagccccagagcatgcagcgaattgcaggcactaacgtctggcagtggacgacacaactcaatgccaactggcgcggcagctactgctttattcccaccgaacgcgatgacattttttctgtaccatcccccgatcgcctcgaattgcgcgaaggctggcgaaaactattaccccaggcgatagccgatccgctgaacctacaaagctggaaaggcgggcgagggcacgctgtttctgcactcgaaatgccgcaagcgcctctgcaaccgggatgggattgtccgcaagcgccagaaatacctgccaaagaaattatctggaaaagtgaacggttgaaaaagagtcggcgtgtatggatttttaccaccggcgatgcaacagcagaagaacgcccgctggcagttttgctcgatggcgaattttgggcgcaaagtatgcccgtctggccagtgctgactagcctgacccatcgtcagcaacttcctcccgccgtgtatgtgttgatcgacgctatcgacaccacgcaccgcgcccacgaactgccgtgtaatgcggatttctggctcgcagtacagcaagagttattacccctggtgaaagctattgccccttttagcgatcgtgccgatcgcaccgtggttgccgggcagagttttggtgggctttccgcgctgtatgccggactgcactggcctgaacgctttggctgtgtattaagccagagtggaagctactggtggccgcatcggggcgggcagcaagagggcgtgttacttgaaaagctaaaagctggtgaagttagcgccgaaggtctgcgcattgtgctggaagcgggtattcgcgagccgatgatcatgcgggccaatcaggcgctgtatgcgcaattacaccccataaaagaatccattttctggcgtcaggttgacggcggacatgatgcgctttgttggcgcggtggcttgatgcaggggctaatcgacctctggcaaccacttttccatgacaggagttgaatatggcattcagtaatcccttcgatgatccgcagggagcgttttacatattgcgcaatgcgcaggggcaattcagtctgtggccgcaacaatgcgtcttaccggcaggctgggacattgtgtgtcagccgcagagtcaggcgtcctgccagcagtggctggaagcccactggcgtactctgacaccgacgaattttacccagttgcaggaggcacaatgagccagcatttacctttggtcgccgcacagcccggcatctggatggcagaaaaactgagtgaattaccctccgcctggagcgtggcgcattacgttgagttaaccggagaggttgatagcccattactggcccgcgcggtggttgccggactagcgcaagcagatacgctgcggatgcgttttacggaagataacggcgaagtctggcagtgggtcgatgatgcgctgacgttcgaactgccagaaattatcgacctacgaaccaacattgatccgcacggtactgcgcaggcattaatgcaggcggatttgcaacaagatctgcgcgtcgatagcggtaaaccactggtctttcatcagctgatacaggtggcggataaccgctggtactggtatcagcgttatcaccatttgctggtcgatggctttagtttcccggccattacccgccagatcgccaatatttactgcacatggctgcgtggcgaaccaacgcctgctagcccatttacgcctttcgctgatgtagtggaagagtaccagcaataccgcgaaagcgaagcctggcagcgtgatgcggcattctgggcagaacagcgtcgtcaactgccgccgcccgcgagtctttctccggcacctttaccggggcgcagcgccagcgcagatattctgcgcctgaaactggaatttaccgacggggaattccgccagctggctacgcaacttagtggtgtgcagcgtaccgatttagcccttgcgctggcagccttgtggctggggcgattgtgcaatcgtatggactacgccgccggatttatctttatgcgtcgactgggcagcgcggcgctgacggctaccggacccgtgctcaacgttttgccgttgggtattcacattgcggcgcaagaaacgctgccggaactggcaacccgactggcagcacaactgaaaaaaatgcgtcgtcatcaacgttacgatgccgaacaaattgtccgtgacagcgggcgagcggcaggtgatgaaccgctgtttggtccggtactcaatatcaaggtatttgattaccaactggatattcctgatgttcaggcgcaaacccataccctggcaaccggtccggttaatgaccttgaactggccctgttcccggatgtacacggtgatttgagtattgagatcctcgccaataaacagcgttacgatgagccaacgttaatccagcatgctgaacgcctgaaaatgctgattgcccagttcgccgcggatccggcgctgttgtgcggcgatgtcgatattatgctgccaggtgagtatgcgcagctggcgcagctcaacgccactcaggttgagattccagaaaccacgcttagcgcgctggtggcagaacaagcggcaaaaacaccggatgctccggcgctggcagatgcgcgttacctgttcagctatcgggaaatgcgcgagcaggtggtggcgctggcgaatctgctgcgtgagcgcggcgttaaaccaggggacagcgtggcggtggcactaccgcgcagcgtctttttgaccctggcactccatgcgatagttgaagctggagcggcctggctaccgctggataccggctatccggacgatcgcctgaaaatgatgctggaagatgcgcgtccgagcctgttaattaccaccgacgatcaactgccgcgctttagcgatgttcccaatttaacaagcctttgctataacgccccgcttacaccgcagggcagtgcgccgctgcaacttagtcaaccgcatcacacggcttatatcatctttacctctggctccaccggcaggccgaaaggggtaatggtcgggcagacggctatcgtcaaccgcctgctttggatgcaaaatcattatccgcttacaggcgaagatgtcgttgcccaaaaaacgccgtgcagttttgatgtcagcgtgtgggagtttttctggccgtttatcgcaggggcaaaactggtgatggctgaaccggaagcgcaccgcgacccgctcgctatgcagcaattctttgccgaatatggcgtaacgaccacgcactttgtgccgagcatgctggcggcatttgttgccagcctgacgccgcaaaccgctcgccagagttgcgcgacgttgaaacaggttttctgtagtggtgaggccttaccggctgatttatgccgcgaatggcaacagttaactggcgcgccgttgcataatctatatggcccgacggaagcggcggtagatgtcagctggtatccggcttttggcgaggaactggcacaggtgcgcggcagcagtgtgccgattggttatccggtatggaatacgggtctgcgtattcttgatgcgatgatgcatccggtgccgccgggtgtggcgggtgatctctatctcactggcattcaactggcgcagggctatctcggacgccccgatctgaccgccagccgctttattgccgatccttttgccccaggtgaacggatgtaccgtaccggagacgttgcccgctggctggataacggcgcggtggagtacctcgggcgcagtgatgatcagctaaaaattcgcgggcagcgtatcgaactgggcgaaatcgatcgcgtgatgcaggcgctgccggatgtcgaacaagccgttacccacgcctgtgtgattaaccaggcggctgccaccggtggtgatgcgcgtcaattggtgggctatctggtgagccaaagcggcctgccgttggataccagcgcattgcaggcgcagcttcgtgaaacattgccaccacatatggtaccggtggttctgctgcaacttccacagttaccacttagcgccaacggcaagctggatcgcaaagccttaccgttgcctgaactgaaggcacaagcgccagggcgtgcgccgaaagcgggcagtgaaacgattatcgccgcggcattcagcagcttgctggggtgtgacgtgcaggatgccgatgctgatttcttcgcgcttggcggtcatagcctactggcaatgaaactggcagcgcagttaagtcggcaggttgcccgccaggtgacgccggggcaagtgatggtcgcgagtactgtcgccaaactggcaacgattattgatgctgaagaagacagcacccggcgtatgggattcgaaaccattctgccgttgcgtgaaggtaatggcccgacgctgttttgtttccatcctgcgtccggttttgcctggcagttcagcgtgctcagccgttatctcgatccacaatggagcattatcggcattcagagtccgcgccccaatggccccatgcagacggcggcaaacctggatgaagtctgcgaagcgcatctggcaacgttacttgaacaacaaccgcatggcccttattacctgctggggtattcccttggcggtacgctggcgcagggtattgcggcgcgactgcgtgcccgtggcgaacaggtggcatttcttggcttgctggatacctggccgccagaaacgcaaaactggcaggaaaaagaagctaatggtctggacccggaagtgctggcggagattaaccgcgaacgcgaggccttcctggcagcacagcagggaagtactagtacggagttgtttaccaccattgaaggcaactacgctgatgctgtgcgcctgctgacgactgctcatagcgtaccgtttgacggtaaagcgacgctgtttgttgctgaacgcacacttcaggaaggtatgagtcccgaacgcgcctggagcccgtggatagcggagctggatatctatcgtcaggattgtgcgcatgtggatattatctctccagggacgtttgaaaaaattgggccgattattcgcgcaacgctaaacaggtaaattaatattatttataaacccataattacagaaaataattatgggttttttatttgtttgatttataggtttgatgaatatttctcttaaatagagtgaatgttgcattcagtggaaggaatttacaaacttcagcttcggataattatcaccaactggtaaagtgagcgccgtggagatttccccctattggactcattttcaggttataccccatgagtagtctgaatattaaacagggaagtgacgctcattttcccgattatcctctggcgagccccagtaataatgaaattgatttacttaatctaatcagtgttttatggcgggccaaaaaaacggtcatggcggtcgtttttgcgtttgcctgcgcaggcttgctgatctctttcatcctgccgcaaaaatggaccagcgcggcggttgtcacgcctccagaacctgttcagtggcaagagttggagaaaagtttcactaagcttcgtgtgctggatctggatatcaaaattgatcgtacagaagcatttaacctgtttatcaagaagtttcagagcgttagcttgctggaagagtacctgcgtagtagtccttatgtgatggaccaattaaaagaggcgaaaatcgacgaactggatttgcatcgcgcaattgtcgcattgagcgaaaaaatgaaagcggttgatgacaatgccagtaagaaaaaagatgaaccgagtctgtatacctcctggacgctaagttttaccgcgccaaccagtgaagaggcgcagaccgttttgagcgggtatatcgattatatctctacgttggtggtgaaagagagcctagaaaacgtccgtaataaactggagatcaaaacccagtttgaaaaagaaaaactggctcaggatcgcattaaaacgaaaaatcaacttgatgcaaacattcagcgcctcaattatagtctcgacattgccaacgcggcaggaattaaaaagcccgtttacagtaatggtcaggccgttaaagatgaccccgatttttctatttctctcggtgcagacggtattgaacgcaaactggaaatagaaaaagcggtcactgacgttgcggaactgaacggtgaattacgtaatcggcagtatcttgtcgagcaattaacaaaagcacatgtcaacgatgtgaattttacgccgtttaaatatcagttaagcccgagtttgccagtgaaaaaagacggtccgggtaaggcgattattgtgatcctttccgcgttgatcggcgggatggtggcttgtggtggcgtgctgttgcgctatgcgatggcatccagaaaacaggatgccatgatggcagaccacttagtttaactatttgcggtactaggtgccgttcgtccgagcggcaccacaagcggcgttccggcaactggatcgtcaatgatcatgcagcgcagaccataaatgcgctcaatcagttcagcagtgacaatctccttcggcgctccctgagcaacaattttcccttcccgcaatgcaatcaaatggctggcgtaacgacaggcctgattaagatcgtgcagcaccgccgccagggtatagcctttttcgcggttcagttcgcttaacaactccagcaaatcaatctgatgactgatatccagccaggtcgtgggttcgtcgagcagcataattgccgtttcctgggccagcaccatcgcgatccacgctcgctggcgttgtccgccagaaagggtatccacgctttgatctgccagatgagttattcccgtggcctgcattgctttcgttaccgcttcttcatcctctttgcgccagcgggtaaacagcggttgatgcggataacgtccacgcgccaccagctcctgcacggtgatatcgcccggcgtggtagcattttgcgccaacagaccaatccggcgtgcaacctctttactggcgtaatgttgaatgtgctcgccatccagccagacatgcccatgagcaggcgtcatcaggcggcttaaggtacgcagtaacgtggatttaccgcagccatttggcccgataattgccgtgaagtgaccatcaggtatttctacagtcagattttccgcaacggtatatttgccatatcccagggttaactgttcgccgcgcaaacgggctacactttcggtcattttttgcgagactcctgaattaacaagacgataaggtaaataccgccgaggctgacggtaacgacgccaaccggaagttgatacggcataaacagttgttgggcgcagagatcggccgccagcagtaacagcgccccgcatagcgccgcctgggttagcccccagcgagcggtgccgctaatgcgtcgggcaatgtgcggtgcgactaaagcaataaaggaaatcggcccggcaagcgctgttgccgcagcggtaagcaccactgcaaccagcatcattaacagacggctacgttcgacgctgacgcccagcgcacacgcggtatcatcgcccatttccagcaagcgcatccggcgtaccagtaaggcggcggcaatgagcatcaatataatgatgggtgcggaagggctggtttttgcccacgtcaggccgttgaggcttccggcattccacaaacctgctgttagcgccgtttctaaagacgctttcagcaacagccaggtattaaaggccaccagcatggcgcgaacgccgataccgataataatcaaccgaaaggtgtcgatgccgttgcgccaggcgagcagccagaccagcaggctagtgacaatgccgcccaccattgcactcagcgcgatagccgtcaggtcctgaccaaacagcaccatcgccaccagcacgccgctccacgccccggtgttaaagcccattacgtcagggctgccgagcgggttacgcatcaggctctgaaaaatcgcgccactgacgcccagtgctgcgccaatcaacagcgccatcagcacgcgtggtaaacgccattcggtgaccaccatcgtcatactgcgcggcgcatcgcccatcagcgcggcgaatacctggctggtttccagcgtgacggcaccgctgcgtaatccccagatacctgcaaccacacaggcggaaaccagcagcaaacaggtgatgagtaatcggcgagagacgtaaatcatgcaccacctcgcgttttacgtcgcacgaggaagatcagcaccggtgcaccaataaacgcactgaccacagaaacgcgcagttcgccgggcacaatcacccgcccgatgatatcggcaaacagcagcagggcaggggtagcaagtagcgtgacgggcaggctccagcgatgatcggcacccaccagccaacgcgccatatgcggcatcatcaggccaataaaggcaatcgggccaactattgccgtcgcactaccacaaagcacggtaatcgccagcagaccaatcaactgtgtgcgcgccacgcgactgcccagcgccgtcgcggtgtcgctgccgaggctcaaactgttcagcgcgcgactcagtaatagcgcagttgctccggcgatcagcaccgggatcagcaccacttttaaggtatgtagattgcgaatatccaggctaccggcttgccagaaacgcaactgatcgtagacgtcaggattaagcagggcgatgccgctggtcagtccttccagcaccgccgccagcgccacgcccgccagggttaaacgcaccggacttaactgcccgccgccctgactgccggtaaaggcaacaatcaaactggccaccagcgccccggcgaaggccatcgccagttgttcctgcgcggaagagtaaccaaacagcgccgcacccagcacaatggcaaagctggctccggcgttcacgccaagcaagccggggtcggcaagtgggtttcgggtgagggtttgcattaacgccccggcaaggccaagcgcgccgcctgccagtaaaccggcaagggtacgcggcagccgcgcgtcgagcacgatggtgcagtcggcgctctggcaggtgccggagaaggcctccagcactacggaagcggggagactttttgccccaatgagcaggcttaatgccgtcgcgataatcagtaataacagcaatccgggcacggcaatggcgcgtgtcacggcaacagaaccagacatacgaacttccatgataatgaaattaattatcgttatcgatcttatttggatatgttagcatgtgcagcctaagaataggtatttaaaatatttgatggcaaggcattgtaatgaataaacaatcctggctgcttaacctcagcctgttgaaaacgcacccggcgtttcgcgcagtattcctcgctcgtttcatcagtattgtgtctctgggtttgctcggcgtcgcggtgccggtgcagatccagatgatgacacattccacctggcaggtggggcttagcgtgacgctgaccggcggcgcgatgtttgttggcctgatggtcggcggtgtgctggcggatcgctatgagcgcaaaaaagtgattttgctggcgcgcggcacctgtggcattggcttcattggactgtgccttaatgcactgctgccggagccgagtttgctggcaatctatttacttggtttatgggatggttttttcgcaagccttggcgttacggcgctattggcggcgacaccagcactggtagggcgtgaaaacttaatgcaggccggggcgatcaccatgttgaccgtgcgtctggggagcgtgattagccccatgattggcggtttattgctggcgaccggtggcgtagcctggaactacgggctggcggcggcgggcacgtttattaccttgctaccgttgttaagccttccggcgttgccaccgccaccgcagccgcgtgagcatccgttgaaaagtttactggcaggatttcgttttctgcttgccagcccgctggtgggcgggattgcgctgctgggtggtttattgacgatggcgagcgcggtgcgggtactgtatccggcgctggctgacaactggcagatgagtgcggcacagattggttttctctacgcggcgatcccgctcggcgcggctattggtgcgttaaccagcgggaagctggcacatagtgcgcgaccagggttattgatgctgctctccacgctgggaagcttcctcgccattggtctgtttggcctgatgccgatgtggattttaggcgtggtttgtctggcgctgttcggctggttgagtgcggtcagcagcttgctgcaatacacaatgctgcaaacgcaaaccccggaagcgatgttagggcggattaacggtttgtggacggcgcagaacgtgacgggcgatgccataggcgcggcgctgctgggtggtttgggcgcgatgatgacaccggttgcttccgcaagcgcgagcggttttggtttgttgattatcggcgtgttgttattgctggtgctggtggagttgcgacattttcgccagacgccgccgcaggtgacagcgtccgacagttaatgcttaaaacagcgccttaagcctatccagcacttgcatggcgctgtagtaatccagacggaacgtctcggttcccagcgcataaacctgcttgttttgtactgcaggcaggtgcgcgagcagcggattagcataaatagcatcggcatctttctgatcaccggcgaacaggaatagactctcgccatttaaccctgcagccagattttccccaccaagctgaatgatgtcatggcgtttaccctgactttggctggcatttaaccctgcgggtaacttcgccagcgtaaagccgagttgttccagcatctgcccttgtgcactttctggcgtccagagattggcactgtgtgcagcggcagtatagacaatggcagtgaccggctgcggcggtaatttgatttgctctttcgccgccgccagttgcttatcaaactgcgcaatccgctctgccgcttgtttctcatgcccggtaatttcgccaagttgcgttaacaggctctgccagcttttgtcgtcgtaattgatgattaatgtcggggcgatggtggaaagctgatcatacagtgccagcgcgctatccccgccggttgcgctaattaaaatcagatccggcatttgcgcggcaacggcttcggcgctcggttcgccgatatagagccgttgcagtttgcgttctttcgccaccttgctccactggcgtaaaaagccctggtcatccgcgacgcggttattcggcgtggtcgcgccgctggcgatcaccggagcatcaatcgccagcagactgccggtcagggtgacgctggtggaaacaatacgctgcggctggctttccagtgtatgtgtgccacggctgtcagtaatctgacgcggccagtcagcggcctgaactgcggctattccactaagcaaaagtcctgttaatagaagggcgttgcggtagagcggggcgagtctcacaaatcagcttcctgttattaataaggttaagggcgtaatgacaaattcgacaaagcgcacaatccgtcccctcgcccctttggggagagggttagggtgaggggaacagccagcactggtgcgaacattaaccctcaccccagccctcaccctggaagggagagggggcagaacggcgcaggacatcacattgcgcttatgcgaatccatcaataatgcttctcattttcattgtaaccacaaccagatgcaaccccgagttgcagattgcgttacctcaagagttgacatagtgcgcgtttgcttttaggttagcgaccgaaaatataaatgataatcattattaaagcctttatcattttgtggaggatgatatggatacgagtctggctgaggaagtacagcagaccatggcaacacttgcgcccaatcgctttttctttatgagcccgtaccgcagttttacgacgagtggatgtttcgcccgcttcgatgaaccggctgtgaacggggatagccccgacagtcccttccagcaaaaactcgccgcgctgtttgccgatgccaaagcgcagggcatcaaaaatccggtgatggtcggggcgattcccttcgatccacgtcagcctagcagcctgtatattcctgaatcctggcagagcttctcccgtcaggaaaaacaagcttccgcacgccgtttcacccgcagccagagcctgaatgtggtggaacgccaggcaattccggagcaaaccacgtttgaacagatggttgcccgcgccgccgcacttaccgccacgccgcaggtcgacaaagtggtgttgagtcggttgattgatatcaccactgacgccgccattgatagtggcgtattgctggaacggttgattgcgcaaaacccggttagttacaacttccatgttccgctggctgatggtggcgtcctgctgggggccagcccggaactgctgctacgtaaagacggcgagcgttttagctccattccgttagccggttccgcgcgtcgtcagccggatgaagtgctcgatcgcgaagcaggtaatcgtctgctggcgagtgaaaaagatcgccatgaacatgaactggtgactcaggcgatgaaagaggtactgcgcgaacgcagtagtgagttacacgttccttcttctccacagctgatcaccacgccgacgctgtggcatctcgcaactccctttgaaggtaaagcgaatagccaagaaaacgcactgactctggcctgtctgctgcatccgacccccgcgctgagcggtttcccgcatcaggccgcgacccaggttattgctgaactggaaccgttcgaccgcgaactgtttggcggcattgtgggttggtgtgacagcgaaggtaacggcgaatgggtggtgaccatccgctgcgcgaagctgcgggaaaatcaggtgcgtctgtttgccggagcggggattgtgcctgcgagcagtccgttgggtgagtggcgcgaaacaggcgtcaaactttctaccatgttgaacgtttttggattgcattaaggagcgaggatgagcattccattcacccgctggccggaagagtttgcccgtcgctatcgggaaaaaggctactggcaggatttgccgctgaccgacattctgacgcgacatgctgcgagtgacagcatcgcggttatcgacggcgagcgacagttgagttatcgggagctgaatcaggcggcggataacctcgcgtgtagtttacgccgtcagggcattaaacctggtgaaaccgcgctggtacaactgggtaacgtcgctgaattgtatattacctttttcgcgctgctgaaactgggcgttgcgccggtgctggcgttgttcagccatcagcgtagtgaactgaacgcctatgccagccagattgaacccgcattgctgattgccgatcgccaacatgcgctgtttagcggggatgatttcctcaatactttcgtcacagaacattcctccattcgcgtggtgcaactgctcaacgacagcggtgagcataacttgcaggatgcgattaaccatccggctgaggattttactgccacgccaagtcctgctgatgaagtggcctatttccagctttccggtggcaccaccggcacaccgaaactgatcccgcgcactcataacgactactactacagcgtgcgtcgtagcgtcgagatttgtcagttcacacaacagacacgctacctgtgcgcgatcccggcggctcataactacgccatgagtagcccaggaagcctgggcgtctttcttgccggaggaacggttgttctggcggccgatcccagcgccacgctctgtttcccattgattgaaaaacatcaggttaacgttaccgcgctggtgccacccgcagtcagcctgtggttgcaggcgctgatcgaaggcgaaagccgggcgcagcttgccagcctgaaactgttacaggtcggcggcgcacgtctttctgccacccttgcggcgcgtattcccgctgagattggctgtcagttgcagcaggtgtttggcatggcggaagggctggtgaactacacccgacttgatgatagcgcggagaaaattatccatacccagggttacccaatgtgtccggatgacgaagtatgggttgccgatgccgaaggaaatccactgccgcaaggggaagtcggacgcctgatgacgcgcgggccgtacaccttccgcggctattacaaaagtccacagcacaatgccagcgcctttgatgccaacggtttttactgttccggcgatctgatctctattgatccagagggttacatcaccgtgcaggggcgcgagaaagatcagattaaccgtggcggcgagaagatcgctgccgaagagatcgaaaacctgctgctgcgccacccggcggtgatctacgccgcactggtgagcatggaagatgagctgatgggcgaaaaaagctgcgcttatctggtggtaaaagagccgctgcgcgcggtgcaggtgcgtcgtttcctgcgtgaacagggtattgccgaatttaaattaccggatcgcgtggagtgtgtggatagtcttccgctgacggcggtcgggaaagtcgataaaaaacaattacgtcagtggctggcgagtcgcgcaagtgcctgaaggagagaacacgatggctattccaaaattacaggcttacgcactgccggagtctcacgatattccgcagaataaagttgactgggcctttgaaccgcaacgtgccgcgttgttaatccatgatatgcaggactattttgtcagcttctggggcgagaactgcccgatgatggagcaggtgatcgcgaatattgctgcgctgcgcgactactgcaaacagcacaatatcccggtttattacaccgcccagccgaaagagcagagcgatgaagatcgggcgctgttgaatgatatgtgggggccgggcctgacccgcagcccggaacagcaaaaggtggtggatcgcctgacgccagatgccgacgacacggtgctggtgaagtggcgctacagcgcgtttcatcgttctccgctggagcaaatgctgaaagagagtggacgtaaccagctgattattaccggggtatatgcccacattggctgtatgaccaccgcaaccgacgcatttatgcgcgatattaaaccgtttatggtggcggatgcgctggccgatttcagccgtgacgagcatttgatgagcctgaaatatgtggccggacgttctggccgggtggtgatgactgaagaattactgccagcacctatccccgccagcaaagcggcgctgcgtgaggtgatcctgccgttgctggacgagtccgatgaaccgttcgatgacgacaacctgatcgactacggtctggatagcgtgcgcatgatggcgctggcggcgcgctggcgcaaagtgcatggtgatatcgactttgtcatgctggcgaaaaacccgaccatcgacgcctggtggaagctactctcccgcgaggtgaaataatggatttcagcggtaaaaatgtctgggtaaccggcgcaggtaaaggtatcggctacgccacggcgctggcgtttgttgaggcgggagcgaaagttacaggttttgatcaagcgttcactcaggagcaatatccctttgcgaccgaagtgatggatgttgccgacgctgcgcaggtcgcgcaagtgtgtcagcgactgttagctgaaacggagcgactggacgcgctggtcaatgcggcgggaattttacgcatgggcgcgaccgatcagctcagtaaagaggactggcagcagacttttgcggttaacgtcggcggtgcgtttaacctgttccagcaaaccatgaaccagtttcgccgtcagcggggcggggcgattgtcactgtggcgtccgacgccgcgcacacgccgcgtattggcatgagtgcttatggcgcaagcaaagcggcgctgaaaagcctggcgttgagcgtcgggctggaactggcgggtagcggcgtgcgctgtaatgtggttagccctggctccaccgacaccgatatgcaacgcacgctgtgggtgagcgatgacgccgaagaacagcgtattcgcggctttggcgagcagtttaaactcggcattccgctggggaaaatcgcccgtccacaagagatcgccaacacgattttgttcctcgcctctgacctcgccagccatattaccctacaggatattgtggtcgatggcggcagtacgctgggggcataagcatgatctggaaacgccatttaacgctcgacgaactgaacgccaccagcgataacacaatggtggcgcatctgggaattgtgtatacccgtctgggcgatgatgtgctggaagccgaaatgccggttgatacccgtactcatcagccgttcggtttactacatggcggcgcgagcgcggcgctggcggaaacgctgggaagcatggccggatttatgatgacccgcgacggacagtgtgtggtaggcacagaacttaatgcaacacaccatcgcccggtgtctgagggaaaggtacgcggcgtctgccagccgctgcatcttggtcggcaaaatcagagctgggaaatcgtcgttttcgatgaacaggggcggcgttgctgcacttgtcggctgggtacggcagttttgggatgaacccgacagaattagatgagattgcaggaaaactcggttaacggagtgatcgagttaacattgttaagttaaatattggtttcaactccgatttacatggttgctgtgttgttaaattgtacaaagatgttatagaaacaaaatgtaacatctctatggacacgcacacggataacaactatgaacaaaagtgggaaatacctcgtctggacagtgctctctgtaatgggagcatttgctctgggatacattgctttaaatcgtggggaacagatcaacgcgctgtggattgtggtggcgagcgtctgtatctatctgatcgcttaccgtttttatgggctgtatatcgccaaaaatgtgctggcggttgacccgacgcgtatgacgccagcggtgcgccataacgacgggctggactatgtgccgacggacaagaaagtgctgttcggtcaccattttgcggccattgccggagcaggtccgctggtggggccggtactggcggcgcaaatgggctacctgccggggatgatctggctgctcgctggggtggttctcgccggtgcggtgcaggatttcatggtgctgtttgtttctacgcgccgtgacggtcgcagcctgggtgagctggtcaaagaagagatggggccaaccgccggggtgattgcgctggtggcctgctttatgatcatggtcattatccttgcagtgctggcgatgatcgtggtgaaagccctgactcatagcccgtggggaacatataccgttgcgttcaccattccgctggcgctgtttatggggatctacctgcgctatctgcgtccggggcgtattggcgaagtgagcgtcatcggtctggtattcctgattttcgccattatctctggcggctgggtggcagaaagtccgacctgggcaccgtactttgactttaccggcgtgcagttgacctggatgctggtgggttacggttttgtggcggcggtgctgccggtgtggttactgctggccccgcgtgactacctctctaccttcctgaaaatcgggactatcgtcggtctggcggtaggcattttgattatgcgcccgacgctgaccatgcctgcgctgaccaaatttgtcgatggcactggcccggtatggaccggtaacctgttcccgttcctgtttatcaccatcgcctgtggcgcggtgtctggcttccatgcgctgatctcttctgggaccacgccgaagatgctggcgaacgaagggcaggcgtgctttatcggctacggtgggatgttaatggaatccttcgtggcgattatggcgctggtttccgcctgtatcatcgatccgggcgtgtattttgccatgaacagcccgatggcggtgctggctccggcagggacggcggatgtggtcgcttctgccgcgcaggtggtgagtagctggggctttagcattacaccagatacgctaaaccagattgccagcgaagtgggtgaacagagcatcatttcccgtgcgggcggtgcgccgacgctggcggtggggatggcctacattctgcacggcgcgctgggcggcatgatggatgtggcgttctggtatcacttcgccattttgtttgaagcactgtttattctgacggcggtggatgcaggtacgcgtgctgcgcgctttatgttgcaggatctgctgggcgtggtgtctcctggcctgaagcggaccgatagtctgcctgctaacctgctggcaacagcgctgtgcgtactggcgtggggctacttcctccatcagggcgtggtcgatccgctgggcggcattaacactctgtggccgctgtttggtattgccaaccagatgctggcagggatggcgctgatgctctgtgccgtggtgttgttcaagatgaaacgtcaacgttacgcctgggtggcgctggtaccaacggcctggctgctgatttgtaccctgaccgcaggctggcagaaagcgtttagcccggatgcgaaagtcggcttcctggccattgctaataagttccaggcaatgatcgacagcggcaatattccgagccagtatactgagagtcagctggcgcaactggtgttcaacaaccgtctggatgccgggttaaccatcttctttatggtggtcgtggtggttctggcactgttcagcattaagacggcacttgcggcattgaaagatccgaagccaacggcgaaagaaacgccgtatgaaccaatgccggaaaatgtcgaggagatcgtggcgcaggcaaaaggcgcacactaaagtcagagtgagggggggatgttggcgaatgttggcttagtgcccagggttccctctcaccctaaccctctccccggtggggcgaggggactgaccgagcgcgttgatagcatttgtaggccggataaggcgttcacgccgcatccggcactctttcagcaacatggttagcggaggccaagatgtttgatagtctggcaaaagccggaaaatatttaggtcaggcggcgaagctgatgattggtatgcctgattacgacaactatgtcgaacatatgcgggttaaccatcccgatcaaacgccgatgacctacgaagagtttttccgtgagcggcaggacgcgcgctacggtggaaaaggcggcgcgcgctgctgctaaatttgtacgtcaggctttaaagctttccacttttttgaacgctgcacgcaacgtatctggtgtcagcgtgactggcaggtaatgaatggactccaccggacgcagggtgtgggcaatcactttgtcgatctccgcctgattattgatatccacttccagctccgccagtgtagtcggcagatgaaaacgctgatacgctccagttaattgcgccagcacatcatcctgacccagcaaggcgctttgcaccagaattccgtaggcgactttggtgccgtggagaaacttctcggtttgcggcagcacggtcagaccgttatgcacggcatgagctgccgccacacgcgtaaaacgatcgcccagaccaccaaccatcccaccaccagcaataatagcatccaccacatcgcaaaaactttgcgttaactgttgattttgctgatcgctcagcgcctgttcgctactgtttaacaagacgtcgcgaatggcttgcgcattattgatccccagtcgcacggttagcggcaacgtttctggttgcggagccagcaccaccgcttcataccatttcgccagcgtgtcaccgatccccgccagcagatattgttgcggtgcattgaggataatctccggttccaccagcaccataaaattggcgtcgtcgaaaatctcataatgcagcgcctgtccggcatcattataccagacggagagcggtgtccaggcggcgcaggtggcggcgatcgtcggaacggcaacaaacggcagaccgagacggcgggcgagggctttcgcggtgtcgagcagtgcaccgccaccgacgccaatcaccacgctgcggtcgtcaccggactcagccgccagttgttgtacatcgctttcgctgcaatgaccgcgaaacaaaatatgctttgcccctggcagtccaaacgctggcggaagtttggtttgcgccgcagcaatggcgcgtttgccgtagatccacaccgcgcgagaaagttgttcatcagtgaaaaaatcgtgcaggtgattgaaacttcctggatgactaaagtagttagccgggccgacgaccacgcggataggattgtgaggcatgttgtgttgtccttattgttttatttagacatctaaacgtcttgattgccaaatactagcatcgtgttatagtgccttcaacacgcaacttcgtcaggtacaataaaaatgacaaataaccctctgattccacaaagcaaacttccacaacttggcaccactattttcacccagatgagcgcgctggcgcagcaacaccaggcgattaacctgagccaaggctttcctgattttgatggtccgcgctatttacaggagcggctggcgcaccacgttgcacagggggcaaaccaatacgcgcccatgaccggcgtgcaggccttgcgcgaggcgattgctcagaaaacggaacgtttgtatggctatcaaccagatgccgatagcgatatcaccgtaacggcaggggcgacggaagcgttatacgcggcgattaccgcactggtgcgcaatggcgatgaagtgatttgttttgatcccagctatgacagttacgcccccgccatcgcgctttctgggggaatagtgaagcgtatggcactgcaaccaccgcattttcgcgttgactggcaggaatttgccgcattattaagcgagcgcaccagactggtgatcctcaacactccgcataaccccagtgcaactgtctggcagcaggctgatttcgccgctttgtggcaggcgatcgccgggcacgagatttttgtcattagcgatgaagtctacgagcacatcaactttagtcaacagggccatgccagtgtgctggcgcatccgcagctgcgtgagcgggcagtggcggtttctagttttggcaagacctatcatatgaccggctggaaagtgggttattgtgttgcgccagcgcccatcagcgccgaaattcgcaaggtacatcagtatctgacctttagcgtgaataccccggcacagctggcgcttgctgatatgctacgtgcagaacctgagcattatcttgcgttaccggacttttatcgccagaagcgcgatattctggtgaatgctttaaatgaaagccggctggagattttaccgtgtgaaggtacatactttttgctggtggattacagcgcggtttctaccctggatgatgttgagttttgccagtggctgacgcaggagcacggcgtagcggcgattccgctgagcgtgttttgcgccgatcccttcccacataaactgattcgtctctgttttgccaagaaggaaagcacgttgctggcagcagctgaacgcctgcgccagctttaattatttaaccgtccaggcgcgggaatattgacggtcggcaaacaactcttgcaggccgttaatttgcttcaggcgcagcacttcgtcgctgtccattcccagctctttgccaattttattatcgtcccatcccaactggctaagttcacggacgatttcgctcatggcggtgatttgatggcgtccacgagcgcgattatgacgaatagtcgcggcgatgcgttgattacgcgtaccttccagacaggtcaccggcaaataaccttttaagcgtaattttaaactactactgcctttaccaatttcatggcggtgaaaaccatccacgatttccatggcatttttatccgtatgtgtgaccacaatgggttgggtaaaaccatctatttcaatggatttttgcagcagttttttttcgggtggtgccacgttgtttgggttgtaatcattaggcataagttggctgtttttaacccacagaacgcaatccactggctcttcacgaaaggggctaacctgatggatcgccatgcggatttcattaatcgctttgatgcgatcatcttccggcaagctggcgagaaattgcgttaaatcctgcgttaatcgttgttgcatagtatcccccattcctgacgttttccttttatccgttcgttataacgctgatagttcttgctttttgtggggctaaaacttaatgcccgacaccagtaatcgttattgagtaaaactttgcatatccgccgccaggaggggatatctttcgcgccaatgtccccttgctgggtttgtggaacctcgatgccttttttctgataccagtgcaaataaatggcgattttattgcggtaatgctcagctgttttttccggcatgctattgagcagcaataatgcatattcttgccagtctaaatgttctggcttgaggattttccgatgcccatagaaatgattgtcatgtccggcgtaaatgccgccactttttaccccgctgactcgtgcgcacatagcagcccagcgatccggttcgataacgtgatagagccataatccttgtcgttgctccgggccaaaaggttcgcaaattcgcatatgacgcagaggaacgcctgcctgatacattaggttatacagtgggttgcagagactttgatgatttgcataccaggtccagatatcagccactttccagtcgtaaatggggtaaatgtaccagctatgaccgcctggtgcggccgtagtccagggtttatcgtcggcaaaacgttgtttatttaaactggcgatggcgacaaaacggttgtaggactcatccgcacggatgccgatcatcatcgccgccggacgtttttgactaaaccattcggcaaactcacgtacaaattgttcgaaggtcatgcctggctggtaaaagcagaaaaagtcagggtcggttatcgcatcttggggaggttgacgtacccattcgacatcaggttcccagcactgccattcgggttggtattgactaagggaattttgcgtcgtaagcgggagcgcaacccagtaaaactcttcgatgacatcggtgtacaactcgcgcagggactgaacatagttaatggtgcaagagaattgcgcctcccagtcgataaacaaaacgcagatttttttgcccatttgtcgggcaagttcggctgtcagatgcagcattaaaccagagtctttgccgccagaaaaactgacacaaacgcggggtagggtgttgagtgtccaggtaatacgctctcgtgcagcttccagaatattgagcggaagaggaattttataaatagacatctgaagacgctctctgaacgttacagggtgatcagtgagataagtctgttaattataaagtaaacactgtaaagcagagtgttttatttttcattcgcgctgtgaataaatagatgaaagttatagtagctgtctgtagttatatatcaaaaactctcatttagacggtcaataaatcgggagaacaccaaattatttaaagaagatttattataggaaatgtaaagctttatactaggtaacggatgttctagttttatctcttttaagttaagaaagtcacggtaggaattataaagttcataggggactattcccagtaaatctgtaactgcaatgctattaatgattgtcagcaaagaggaaccacgaaaactgattttgcgattcataaatctctcgtctatttccatttgaatatcatcaacccctgcacttttagatattaattgggtgaactcttctgccataatttgttcataagtgctattgtcagtaattcgtggatgcctattactacaaattagagtattgcgaatcgtatgcaatggcatgcaaatgacggaacggctgatcactggcatttgggtgatcaccagatcggctttgcggtgaaccaacagttcttcagcattctctgcactcatgaggatatcatggcactcaatctcgacagaggaatcttgccgtaggcagcggatcagcatactattattagagcaagaaatgagctgagggccgtagataataaagtttttctttagttcggacttattgactatattaattgtttgttcaaggcctctgagatttttctcaagatggtgatgcagatttaaccctgttgtcgtcggcgcgataccttttccactgcgaatgaataaagggtcattaaattgcgcacgtaagcgttgtaagctctggctcacggcacttggggtgatatatagactttcagcagctttgctaatgcttaaatgctggtaaatacactcaaatatgacaagaagatttaagtcgaactttttcaagtcgtagagattggccatacactactccggttatatttttcttccatgatatattcacttaatcaatgttttttgcgtatatatttttattgattatgtttttttgcttaactcaggattaagtttttctaaaatagcacagccacttagggcagagcgagcaattcatgcttttttaggatggttgaaaagcagggatatagttcaaccatccatgaattaccttttatttattccccataatgatattaagcgttttctgatcgggcaaccccacggcctgttgtagcgtattttccttactcatgtaatagatagccggcgtgacatttgcccccagatcgtccatcagtttctcattgtcacttaacactttcatttgctctgtacttacgtttgcaggcacgtttagcttaagcttgccaccagaggcttcatattgttgccaggtttttgcgggatctttggaggcaagaattgccgctgctgtcgccgggctttctggcttgataaccccaaccaacaatgttcttaattgcactttgccagaatctacccacgggcgcgcctgctgccagaactgtttacaatatgggcagaacggatcggcgaagacgtagacaatgaccggcgcatcttttttaccgtcgaggagccagtgggattgttccatccgttgccacatttcgcgtccggctggtgcgtaaatttctttttcgataagtgtgttactcaggttttcacctttctcgttgtacatgtaaccagagatagcgtgcttaccatctggagtcaggtagatggtgacgcccatatcctgatactttccgagataacctttcattcctccgggggcatcgaatgttttgatgattgtaatgccctgtttttcaatcgcttttactggagcaggaagttcctctgcgaaggcgattgcaggaagcagagccagtaaaagtatcttttttaacattaatttgtccttttcagtcagtgcaaaagtcgagtaaaaggcataacctatcactgtcataggtaagagcttagatcaggtgattgccctttgtttatgagggtgttgtaatccatgtcgttgttgcatttgtaagggcaacacctcagcctgcaggcaggcactgaagataccaaagggtagttcagattacacggtcacctggaaagggggccattttactttttatcgccgctggcggtgcaaagttcacaaagttgtcttacgaaggttgtaaggtaaaacttatcgatttgataatggaaacgcattagccgaatcggcaaaaattggttaccttacatctcatcgaaaacacggaggaagtatagatgtccttgattaacaccaaaattaaaccttttaaaaaccaggcattcaaaaacggcgaattcatcgaaatcaccgaaaaagataccgaaggccgctggagcgtcttcttcttctacccggctgactttactttcgtatgcccgaccgaactgggtgacgttgctgaccactacgaagaactgcagaaactgggcgtagacgtatacgcagtatctaccgatactcacttcacccacaaagcatggcacagcagctctgaaaccatcgctaaaatcaaatatgcgatgatcggcgacccgactggcgccctgacccgtaacttcgacaacatgcgtgaagatgaaggtctggctgaccgtgcgaccttcgttgttgacccgcagggtatcatccaggcaatcgaagttaccgctgaaggcattggccgtgacgcgtctgacctgctgcgtaaaatcaaagcagcacagtacgtagcttctcacccaggtgaagtttgcccggctaaatggaaagaaggtgaagcaactctggctccgtctctggacctggttggtaaaatctaaatttccttcgtctttcacgccatagcggcgttggcgtcgcccgctcaccccggtcacttacttgtgtaagctcccggggattcacaggctagccgccttgctctgacgcgaaatacttcggaaattcacctaattcttcgggtgctgcggcacccgattttcttccccgcaccatgatgcaagctgcatccaggtagccgcagaggccgcttgcatgatgatgtttaaagcccaggagataaacatgctcgacacaaatatgaaaactcaactcaaggcttaccttgagaaattgaccaagcctgttgagttaattgccacgctggatgacagcgctaaaagcgcagaaatcaaggaactgttggctgaaatcgcagaactgagtgacaaagtcacctttaaagaagataacagcttgccggtgcgtaagccgtctttcctgatcaccaacccaggttccaaccaggggccacgttttgcaggctccccgctgggccacgagttcaccagcctggtactggcgttgctgtggaccggtggtcatccgagcaaagaagcgcagtctctgctggagcagattcgccatattgacggtgattttgaattcgaaacctattacagcctctcttgccacaactgcccggacgtggtgcaggcgctgaacctgatgagcgtactgaacccgcgcatcaagcacactgcaattgacggcggcaccttccagaacgaaatcaccgatcgcaacgtgatgggcgttccggcagtgttcgtaaacgggaaagagtttggtcagggccgcatgacgttgactgaaatcgttgccaaaattgatactggcgcggaaaaacgtgcggcagaagagctgaacaagcgtgatgcttatgacgtattaatcgtcggttccggcccggcgggtgcagcggcagcaatttactccgcacgtaaaggcatccgtaccggtctgatgggcgaacgttttggtggtcagatcctcgataccgttgatatcgaaaactacatttctgtaccgaagactgaagggcagaagctggcaggcgcactgaaagttcacgttgatgaatacgacgttgatgtgatcgacagccagagcgccagcaaactgatcccagcagcagttgaaggtggtctgcatcagattgaaacagcttctggcgcggtactgaaagcacgcagcattatcgtggcgaccggtgcaaaatggcgcaacatgaacgttccgggcgaagatcagtatcgcaccaaaggcgtgacctactgcccgcactgcgacggcccgctgtttaaaggtaaacgcgtagcggttatcggcggcggtaactccggcgtggaagcggcaattgacctggcgggtatcgttgagcacgtaacgctgctggaatttgcgccagaaatgaaagccgaccaggttctgcaggacaaactgcgcagcctgaaaaacgtcgacattattctgaatgcgcaaaccacggaagtgaaaggcgacggcagcaaagtcgttggtctggaatatcgagatcgtgtcagcggcgatattcacaacatcgaactggccggtattttcgtccagattggtctgctgccgaacaccaactggctcgaaggcgcagtcgaacgtaaccgcatgggcgagattatcattgatgcgaaatgcgaaaccaacgtgaaaggcgtgttcgcagcgggtgactgtacgacggttccgtacaagcagatcatcatcgccactggcgaaggtgccaaagcctctctgagtgcttttgactacctgattcgcaccaaaactgcataagaagaagtaagattcacctgcaattgcttagccgccggggtcaaacctggcggcttttttatggcattaaaaagccccgccgggatggctccgggcagggcgggatacttattctggcaattaacgcacaaccagcaccggcagattggcgtggcggatcacgctgctggcgttagaacctaacagatgggtgctaatgcttgggttgcgagaaccaataactacaacatcagcccccagttcttctgccaactcattgacttcatcccgcacgctaccaaaacggacatgttgtttaatgcgggaaggatcgatggtgaagtggctgaccatcgtttgcagacgttcttgtgcttcatgttgcagatgctcttcaaaacgacgcacatcagcggcaaaacggtgcaggctcaggctggcactcccgggtagtacgtgaagtagatgaataactccgtcatcctgggcgaggaattcagcgtggcgaacagctttgtcgctcaattccatttcaaatacatcaactggcataatgattgtcttatacataaccctttctccctgttaatcatgaacaaatcattcgccatgattataatatttatccctgatatttgtctggttctttttccttacgaactgtttctgtgatgaatatattctcactgaacaccaggaattctcccaaaacctgtggtaccgcccgttttcccgctgtgatagctacccttaaagactgactcttttttgaactgtctctggaggttgcatgaaagcattgacttatcacggcccacatcacgttcaggtagaaaatgttcccgatccgggcgttgaacaggcagatgatattattctgcgtattacggcaacggcgatctgtggctctgacctccatctttatcgaggcaaaatacctcaggttaaacatggcgatatttttggtcatgaatttatgggggaagtagttgaaaccggaaaggacgtaaaaaatttgcaaaaaggcgaccgagtggtaattccgttcgtcattgcttgtggcgactgttttttctgtcgattgcaacaatatgccgcctgcgaaaataccaatgcgggtaaaggcgctgcgctcaataaaaaacagataccagctccagcggcattgtttggttatagtcacctgtatggcggcgttcctggtgggcaggcggaatatgtccgcgtccctaaagggaatgtggggccgtttaaagtaccgcctttgcttagtgatgataaagcgcttttcctttctgatattctgccaacggcatggcaggcagcaaaaaatgcgcagatccaacaaggtagtagcgttgcagtctatggtgctggtcctgtgggattgttgacaatcgcctgtgcacggttgctcggtgcggaacagatttttgttgttgatcatcatccctaccgcttgcatttcgccgccgaccgctacggcgcgatcccgattaattttgatgaagacagcgatccggcacagagtattattgaacaaacggcaggtcaccggggcgtggatgcagtaatagacgccgtcggttttgaagcgaaaggcagcaccacggaaacggtgctgactaacctgaaactggagggcagcagcggtaaagcgttgcgtcagtgtattgcggcggtcaggcgtggcggcattgttagcgtaccgggcgtctacgctggatttattcacggtttcctgtttggcgacgcctttgataaagggttgagctttaaaatgggacagacccacgttcacgcatggctgggagaattattaccgttaattgagaaaggattactgaaaccagaagaaattgttacccactatatgccgtttgaagaggccgcccggggatatgagattttcgaaaaacgtgaagaggagtgccgtaaggtgattctggtacccggtgcacaaagcgcagaggcggcgcagaaggcggttagtggtctggtgaatgcgatgccggggggaacaatatgatcgtcaggagtggttttcgaggtaaaggacagccatgacgataatcgccgccataatcagaaatcctatcaggatgtaaaatgcttctgccatggttattcccacaaacgaaacggaataattttgcagcaaaagtgaacagtgagaaccaggaaaaattgctgattttgcgtaaagaggatgcgagtgcatcctctgggcaaagcgagttatcgcttgtgcagatgggattaaagcaggtagtcgccagcagcttctggctggtattcgagttccagcacttcaaggtgggttgcaacgccgcccggaagttcccagtgaatggaatcgccaacgcgcagccccagcagtgcggcacctaccggagccataacggaaagctgagtattgctatcggtcatttttgccggatacaccagcgtgcgcacacgcacttcgccatcgctaagattgcggaatttaacccggctgttcattgtcaccacgtcgtgtggcatctcttctgggctacacatttgggcgcgatccaactctgcgtttaacgcgtcggcgattggcaaaccagcataggcgggttgctccagcagaatatcgatgcgttcggcatccaggtcgttaatgatgatagttggtctggacatttttactccatgtcgtcggtgctgcgagtgtcgcagataaacatacccaaaagaaaaccctcaccgtcaggcggcgagggtttaactcacatgatgatactgactgttgctcactctttgaagtgatttgcgtcacattcagggaattcctcaatgcagcgcattatgtataaatcttaatcgccttggtttatggaagacgaattagcgtgttttgtaaatcagatgattaataacccgctttatcaatcacaaaggttttgccacagttacctgggtgaggttgtggcaagaaactgtttgcagaaagcggagcgttgatggcgtcagctttgatgctgatctgaatttcagtcaaatacgcagggttaccctggcacgttagcttaactgctttcacgttctcttttccccagcttttggcaaaggcggcgtcaaagtcacggcggctcactgttttaccgtaattatccgcaaggaattttccggcttcgctctctttaatttcttgattcaggcgtaccatcgtaccgaagtatgcgtccggatcaaaaccaaagcaggcaccgtgtttggcatattcgtagcgttccaggcaggaacgtccgccagctcctggcatgacttcacttagtttagcggccgtttccagacttaatccggtttccgggctactacacattcggctggcgcgcgcttctggtagattcgggattgggcgagtagcgcaaccgaagcgcatccagcggcgttcatcaacaccacgggcagcaacgcttttaggcaatcctggccacagaccatgtacggtcagaaaatcagctttgttggtcgtttcggtttgcaggcgacattcatctcgttcgttacgatttcgatcgtgttgactctggcaaaatccggtttgccaggagagggccaggacatagcgatcaaaatcgccatactgttttgcctgcaacgctaaggcgttggcagaagagaagggaagcagagaaaccgcgagcaacgcggcgttacgccagaatgctttcataatgggtgtggaactcatacatacactgaatactatctattaaatcataaaaaagcccgccaggtgggcttacctggcgggcgtgatgatttattcagcgtttggcgaacgtattagttccacatggcgagaatcggccagccaaccaacagcaacatagagatgtaaatcaccccgaagattgcgccaagacgccagtaatctttacttttcacatagccacagccgtaaataatcaccccaggaccggttgcatacggcgtcagacagcccatgataccgatagacagcaccagcaggatacacagttgttccattggtacgcccggaatacctttaccgacggccagaataaccggcagcatggttgcggtgtgcgcagacaggctggcaaacaggtagtgtgcaaagtagaacaccagaaccagtacaatcaccgttgcgtttggactgaatccttccaggtgcgtactcatggtaccggcgaaccagtcaataaaaccagaacgagtcaggccgttagccatcacaaccagagttgccaggttgaccagtgtgttccatgcgctgttatagcgggtaatgtctttccaaggcacaacgtgcagggccagcattaggctaactgccagcagaccaaccgcagtagcattaatgacttcactgccaaatacccacaaacctaagctgagcaatacaaggccaatcagtgtccactctctgcgtgtcagcgcacccatggttttcagttcatcacccgcccaggttgccacttcttcactgtgtgtgatttccggtttgtacagcacgtaggaaagccacggcgcaatgataagcaagataaccccaaccggcaggaagcagaggaaccactgcaaccagctaatctggataccggcaattttgctgacgaactccagacccagcacgtttggtgccgcaccggtgacaaacatggagctactcagactggtactaatgaccatcatccacatcaaatagccgccaatacgacgcgcggacggatcgttcgggaaacttttaaacaacggcggcaggtttttaatgaccggaaaaaccgtacccccggtacgcgcggtgttggaaggtgtaaacggtgccagcagaatgtcgataatgacaatcgcataacccaacgtcagcgtgcgtttgcccatgaatttcaccaggaaaagggcaatgcgacgacctaacccggaaacttcataccctaatgcaaaaataaatgcgccaaataccagccataccgtggtgctggaaaaaccagccaggccccatttcagcgcctgtttttgcgcattaaacgctgggtcagctaattctttggcatcaaagagcaggtaattactgccaataacgcaaatagtaaccgcaataaaactgatcgctgttgccggaattggctcgaggatcatgccgacaatcattgccacaaacacagcgaagtaatgccatgcctgcggcggcataccgtcggggacagggataagaaacatgacacccatcaccaccagtggggccaatagtttccatatattatcttttgctaaagacatacgggttctccgaaaattaatatttccaaatttatcaagtgcttaaataattaaatctgtgctaaaaaccaggtaaggatcagtaggtcagcactgccgcctggactgagatttcgttcgatacactccctgtcgaactgccggagataatcgagatcggcgggggttcgaatgccccctttttgcaataatgtttgcgcctcgcgctgtagccagcgcaggcccccctcgccaccgcggcttgcaacgttggtatcgccgttgatcgccatcagtaggagcaaggtatcgagcaatgccagttcaggatctaacccctgatccagcagagtgaggtaatgcggcaaggcgtgattgatcaccagtggataacccgcttcggcttcaccgcgtgcgccggtaaggccaagctgttggtacaaccgttgacctgccgtcagttgactattattggtacgcagttcgcgatcggtcaggccacggcagaaacttgccgccgtagaacaaacggttgttggcgttaccggttggttgagttgaagcaaacggccaattgccgcacatagcagccctaaagaaaaaatgctgcctttatgcgtgtttacgcccgcagtggcgcggaacatatcaccttcgcaagccataccaattgggcgtaatccgtggagtaccgcttctggtgccatttccgcactacaggcaccaaattcaatgaaacggggtagccagccctgaatcgccagcgcgctgcggtggaaatcttccagcgccatatctttgtgcgcaccgcagttaatgcgatccacgaggcctggtttcggactcagattgacttcagtcagcatggcgcgccagcccagcagggcgtactcatcgattaaactcgtcgcaagctttgtggttttagtactcgttgcaggcatgctcatcgttcagcagtgcctccatgttatttagttgacgttgcaggcatcgacatcgttcagcagtgcctccatgcggttgagtaaatcggtcagttgatgggtttttccacgcgcgcagacggctgcgctttgttcgcacaacaggcagcggcgaggcggcagactatagtcgcggcgggagagaatttcgccttcgggcgtcaggacatcgatatcccataaccgcccgagaggatgactatgttcaagctcaatggtggcgagcttgaggtcgcgagccggggcggcaatgctcaacatgccctccggcccgctggcggaaaccagtgcagcctgctcctgaatttgccagccctgttttgcggctaaggcacgcaaggctgtcacgccatgattaaaaattcggcgtgtgacctcgctgtctttaatcggcccaggcgcaaccacggtaaaggagaccagtggaacaggatggcgcttgagccagacgtgttgccgtgcttgcctttcatcccggctgacgagcagctcgggaatacttaccgcatggtggctggcgagttcaggaagcaggtgcatggcttattccttcacctgatgcacaacatcgatcacgctgccatcgcggtaacgcacaacggcaacgacgcggtctgtgaattcaatcggctgtggttcaccggtcagcagacgcgcacgttcgcgcagccactcaatggaaaccactttaatgcccgcttcctgcagacgttctgccagttccggacgtgccgggttaactgcgataccgtggtctgtgaccagaatatcgacactggagcctggggtgatgcaggtcagtacgttatccaccagagtcggaatacgaccgcgtaccagcggcgcgacgatgatggaaagcgcagaggcaatcgcggtatcgcagtgaccaccggaagcaccacgcagtacgccgtcagagccggtcagcacgttaacgttgaactgggtgtcaatttccagcgcgctcagtaccaccacgtcgagacgatcaacgcttgcgcctttgctaccccagttagcgtactggttggcgctgatttcgatgtgattggggttacgggccaggctttgcgcagcatggctgtcaaagctctgcacatccagcagtttgcggatcagacctttttcgtgcaggtcaaccatcgtcgcggtaataccgccaagggcgaagtcggcgcgaatatcgcggctacgcattttgtcttccaggaaacgggttaccgccaggcttgcgccgccggtgccggtttgcatggagaaaccttctttgaagtagccagagttgacaatcacatccgcagcgctacgggcaataagcagttcgcgcgggttagtggtcatacgggtcgcgccagcgccgatttttgcagcatcgccaacgcggtcaactttgacgatcaaatcaacctgatcttgctcaatgcttgccggattatgcggataaggcagcagttcttcggtaagcatcacgacctgttttgcgttgtcggcatcaactattgcatagccgagggagccgcagcaggctttaccggtgtagccgttggcattaccgaattcatcacaggacgggacgccgaggaaagccacgtcgatattcagttcgccgctctgtaccagatgcacacgaccgccgtgagagtggatctgcaccggttctgccagcagaccacgggagatctcttccgccagtggaccacgcaggccggaggtataaatgcgggtaaccacgccctggcgaatgtgttctaccagcggcgcatggcaatcactcagggagctggacgccagggtcaggtttttaaagcccatcttcgcgatgacgtccatcaccatattgacggtcaggtcaccgccacggaaagcgtgatggaaggaaaccgtcatgccgtcctgtaaaccagagcgacgaatcgcttcttccaggttggcgcacagtttgcgatcgcgcgctttttcagcctggtaggtttgctttgggctgttctggaaagcggcaagatcgcattcagcgcgacgattccaggccgctacccgttcttgtcgttgagattgttcaattttctgcgtcattttgattgccttattcttcgcggatgccggaaagttctgcacgggagagcaccagacgggcgcgatcgataaccggaccgtccaccatcttgccgttcagggaaaccacgccgaggccttcgcgagcggcggcttcagcggcttctacgacgcggcgggcgtgatccacttctttctgggtcggtgcgtagaggttgtgcagcagatcaatctgacgcgggttgatcaggcttttgccgtcaaagcccagctgtttgatgtgggcggcttcttgcagaaatccggcttcgttgttagcgtcggaatagacggtatcgaacgcctgaatacccgcagagcgcgcggcctgcaaaatggaacagcgtgcgaacagcagttcagttccttccggggagcgttctgtacgcaggttgcgcacatagtcttctgcaccgagggcgataccgatcaaacgctcggaagcgtgagcgatttccactgcgcgggtaatccccagcggagattcaatcgccgccagcaggccggtgctgccgggttcacgaccacaggctttttcgatacgcaggatctctttttcaatatccagaacatcctgagcggtatcggttttcggcagacgcacaacgtccgcaccaccgcgaacgacggcttccaggtcgttaacaccccattcggaatccagcgcgttgacacgcacaatggtttcaatatcgcgatacagcggatgttgcagcgcgtggtaaaccatgcggcgggcggtgtctttttcacgcaatgctacggagtcttcgaggtcaaacatcagggcatcagccgggtagatgaaggagttgctgaccatcgcggcattggcaccaggcacaaacaacatgctgcggcgggtgcgagttttacgttgttgcaggctagcggaaatcattggcaatcctcccatggcagagccgggataccgctggcgcgtgccagcagggcttccagtcgtgcacgtaaaatgcagtacagtgcgcctttgtcatcgacattcagctgtacgccgcgcacgttgtagcgggcgagaacgtccagaatggtggtgcgaattgcatcgccaaactgtttctcaacgctgctattgatttgcaggtcgatatcctgcgtatcgagtggggcgatgcgtatcatcacatccccagactcaagggtgcctgcaacggcgggctggtttattttcatttttcacctgtttctcatgcgggggtcttttgacgagctgccgcgtcctggcgggagtgctcaagcaggttctgcaaataatgcagcgtgactgcagggaccagcggcgcgatagccgtgagatcgtttttcgccagcagttgacgtacccgggaagcggatatcggcatctcctggtaacgcagccgctcaatttcaaccagttcgatgggcggtgcggagatagtcggcgtttccagccagtagcgcatatcctggttgtactgggcggtaacgcgacaaaagggttcagtaccgacaaagcggtgagttacacccagcgcgggagcgaggtactgacggaaaatcttcagatcaatttcggtgtaacaatggttaatgacgctctgttctttaatgaagtagcaagggaacgtagcgcgggagatgatgtattcggagccacgatgcacagtcaggcgtggaatatcggcggtgccttttaacaccaaatccagccggtcttcataggggaagcgactagaatcttctttgactaaaaacagatgcaaccagtcgcactgtgccgcagcctgttgaatcagataacggtgaccattcgtaaagggattggcgttcatcacaatgcagccaatcttgttccctggatgacgaaattttttcaggctttcggcatagcgtttcagtcgcgtggcgctgttttccatcagcaccatcacgccgggtacgctggtcagcgtggaaaaaccgcactggcggaacagcgcctcgtattcggttttggtataaataaacagatgcgtgctgtgccgctcataggcgaggtttatcaattcagtggctaatgtcagcgccagtccttcaccgcggacggattcactgatagcaacgcatttaataatatttccggcaattccaccgcacgcgataagcttttcatcgcgggttacggtaataaatacttcgactgtggtgtcaacgctcaaatcattttcatgcaggaattgggcgatttccgccatttttttattttcactacgttttacgcgggtgaaaatatcattgccgaacataataaatagtatcctgaaggtgcatgttgttatcgatttgcaacgaatgttgttcaatgttgcaaactgataaccttttattttcacttgggagaaagggggtgatcgaggtatatctttttctcctttcgctatacatcctaaggagtatttcggcgtgaaattttgatttatttcacatagagttagtggttttttatttatttaatgattttaagttttttaattaatgtaattacgaaatgactcgcaggtttaagtgatttaattgatttaatgaataaaatttgccacgatcataattaatatctatgtattttgattcaacattttaattacatccgtcaaagaggctcgggacaacccgcaaggaaaacaatgttgcagcttaacgagaataaacagtttgcatttttccaaagactggcatttccgctgcgtatctttttgctgattctggtgttcagtatatttgtcattgcagccctggcgcaatattttacggccagttttgaggactatttaacgcttcatgtacgcgacatggcaatgaatcaggcgaaaattattgcctccaatgacagtgtcatctctgcggtgaaaacgcgtgactacaaacggctggcgaccatcgctaacaaattacaaagagataccgattttgattatgtggtgattggggaccggcacagcatccgcctttaccatcctaatccggagaaaattggttatcctatgcagttcaccaaacagggcgcgctggagaaaggggagagctacttcattaccgggaaagggagtatggggatggcgatgcgcgccaaaacgccaatctttgatgacgatggaaaagtcatcggcgtggtgagcattggctacctggtgagtaaaatcgatagctggcgggctgagtttttattaccgatggcaggtgtgtttgtcgtgctgttagggattctgatgttgctgagctggttcctggccgcgcatatccgtcggcagatgatgggcatggagccaaagcaaatcgcacgcgtggtccgtcagcaagaggcgctgtttagtagcgtttatgaagggctgattgcggtggatccgcatggttacattaccgccatcaatcgtaacgcaagaaagatgctggggctgagttcccccggacggcaatggttgggtaaacccattgttgaagtggtcaggcccgccgatttctttaccgaacagattgatgaaaaacgtcaggatgtggtggcgaactttaacggtctgagcgttattgccaaccgggaagctattcgtagtggtgatgatttgctgggggccattatcagctttcgtagtaaagacgaaatttccaccctcaatgcgcaactgacgcaaataaaacaatacgttgagagccttcgtacattgcgacacgagcatctcaattggatgagcacgctcaatggtctgttgcagatgaaagagtatgatcgcgtgctggcgatggtgcagggggagtctcaggcccagcaacagcttattgacagcctgcgcgaggcgtttgccgatcgccaggtggcggggctgctttttggtaaagtgcagcgcgcccgggaactggggctaaaaatgatcattgtccccggtagccagcttagccaactgccgccaggactggatagcaccgagtttgcagccattgtgggcaatttacttgataacgccttcgaagccagcctgcgtagcgatgaaggaaacaagatcgttgaattattcctcagcgatgaaggcgatgatgtggtgattgaagtcgccgatcagggctgcggcgttccagagtctctacgagacaaaatatttgagcagggggtcagtacgcgtgctgacgagcccggtgaacatggcattgggttgtacttgattgccagctacgtaacgcgctgcggtggtgttatcactctcgaagataatgatccctgcggtaccttatttagtatctatattccgaaagtgaaacctaatgacagctccattaaccctattgatcgttgaggacgaaacgccgctggcagagatgcatgcggaatatattcgtcacattcccggattcagtcagatattactggcgggaaatctggcgcaggcccgaatgatgatcgagcgttttaagccggggctaatcttgctcgataactatcttcctgacggtagagggattaatttactgcatgaactggtgcaggcgcattatcccggcgacgtggtgtttaccactgcagccagcgatatggaaacggtgtctgaagccgtacgttgtggtgtatttgattatctcattaagcccattgcctatgaacggctggggcaaacgctaacccgtttccgccagcgtaaacatatgctggaaagtattgatagcgccagccagaagcaaattgatgagatgtttaatgcttatgctcgcggtgaacctaaggacgagctaccgaccggcattgaccccttgacgctaaacgcggtgcgaaaactgtttaaagagcctggtgtgcaacatacggcagaaacggtggcgcaggcactgaccatcagccgcaccactgccaggcgttatcttgaatattgcgccagccgccatctgattattgctgaaattgttcacggcaaagttggcagaccacaacgcatataccacagtgggtgacatgataaagccggaggaaacttgcctccggcattactatttacttgcctgtgaccgctgctgccgttcctggcaccatcagctctgtagcaacgataacaatcaccaaaccaacaagcaccggtacgctggtgcgttttacgacttcaaacgggctgatcttcgccatcccggcaaccgcaacgactacgccagaaacggggctaagggtacggccaaggttactcgcctgcagcatcgggatagtcaaatacgccgggttaatgccggaagagtgcgccagtttcgggatcatctcaacaaacgcataaaacggcgcattgccactaccggtcgtgactgccgccagcattgtcagaatcaccaataccagcatcaggatgatactcgcgctaccaaagctggtagcgatagaaatcagactttgaataaagccgatggtgctaagcccctgagcgaataccccagcggcaaccagcagcatcaccacgttagcaaacgcatctgccatcccgcgataagccacttccagaccagagaaaactttctgggtattaaagctgcggaggaactccagaatggaggcaatcagcatacaaatcaccagaatagtgatgatgtgtaattgcggaccccatttaccgtcaaaaatcagtacaccgatgatcggcgtgaacggcaaaatggcataaaacgcaggagcagtggtggtgatttcactgacatctaacatttcatgagagatgtgctcttttttatccagataacgttgccagaagaagtgggcgatcgccatgccgataattgcagcaatactgataggcagcgtcgttttgaaggcgaagtcaatcaggctcatttcggaagcttgcgccgccagcaccacatccccactagtcggtgcgagaataatcgccgccggggaggcacaaatggcagcagctgcgccacgactgataccaacgtttaccatcaccggaaatagggttgccatcagcaaaacacccagaccggttgcggaagagacggccagagacatcagacaggcgacaaaataggcggcaatcatcagcaggtaaggggagttaatatactgcaatggtttactcgccagcttgaccaccatatcattcgcgccgatatgggtcatgtaagcggcaaatccacacagcatcataatcatcatgccgaggtcgccgccgcggctcattagtaatattttaacgtattcaacgatatccgtggcgctgtagcctgtactagcctggctggacggtaacactttgtgccccataatggcactgataatcagcaataacaggccaccgacaaataacacaccagtggcggaataccctttaatgatgtagcgagctacacccacaataaccacaaccccaataaggagctcaatgaatgtcagcataatttttcctgtctccaggccccaaagtaaataataaaaaattcctaaagcttaaggaaaaaatatgcccaataaattggcgatgaatgctgattaaaatcaagaaaaactgccattaagacattgaagttgctgtttttatacatagataacaaaacgcatatttagcggttggcaattatcacataataatgtgtgcaaattgatggtggattgatgcaaatttgttaattgcaatggtgttagctgcggctgtgcgctcaaaaaataatctaatatgagcataggttgacgatatatattatatacttcgttaagatgattgttgtatctcgttaaaaaataaaataatttttccttgattgcattttgtcatcaaaaaagacttggtttttcttttttgactattcccatcgcagaaaacgacgcatcatctttaatcgatgcgcggaaatatttaacttgaacaagcggaaataaatagagcagctattcagattattctttatgttgggtctattaaggttatgttaattgtagctttgctatgctagtagtagatttttgataaatgttttatggtcacaaatgaacgtgagtaaatatgtcgctatcttttcctttgtttttattcagttaatcagcgttggtaaagtttttgctaacgcagatgagtggatgacaacgtttagagaaaatattgcacaaacctggcaacagcctgaacattatgatttatatattcctgccatcacctggcatgcacgtttcgcttacgacaaagaaaaaaccgatcgctataacgagcgaccgtggggtggcggttttggcctgagccgttgggatgaaaaaggaaactggcatggcctgtatgccatggcatttaaggacagctggaacaaatgggaaccgattgccggatacggatgggaaagtacctggcgaccgctggcggatgaaaattttcatttaggtctgggattcaccgctggcgtaacggcacgcgataactggaattacatccctctcccggttctactgccattggcctccgtgggttatggcccagtgacttttcagatgacctacattccgggtacctacaacaatggcaatgtgtactttgcctggatgcgctttcagttttgagacaaatgaagttttagtaacttctttaaaatcaatagctaaaataagtaacatcaaaaataacgcgacttttatcactttttagtaaagttacactggacaaagcgtaccacaattggtgtactggtaaccgacacagcatttgtgtctatttttcatgtaaaggtaattttgatgtctaagattaaaggtaacgttaagtggtttaatgagtccaaaggattcggtttcattactccggaagacggcagcaaagacgtgttcgtacacttctctgcaatccagactaatggttttaaaactcttgctgaaggtcagcgcgtagagttcgaaatcactaacggtgccaaaggcccttctgctgcaaacgtaatcgctctgtaagatacgtcagcaagaattcaaaacccgcttaatcagcgggttttttttggtctttagtgtgcggtactggcgctaaacagccagaatgccagtgcggtcatggcaaaagaccccagaaggttgacgaaaacgttcagtaatgcccagccaaagcggccctcttgtaacaaaaacaccacttctgcgctaaatgtactgaaggttgttagaccgccacaaaatccggtggtgattaatactttccacactggatcaatgttcgtcatcctgctgaaccatgcgaatcctattcctatgatgaatgccccaatcaggtttgctgtcagcgtccccaacggaatcgcctgatgcagtgggttaaatcgcatacttaacagccatctcgccacgcttcccgtaccaccgccaataaaaactgctaaaagaagttgtaacactgcaaaatcctgctatttgatttgtatgagtgataagtgtaacgccgaataatcgtcgttggcgaattttacgactctgacaggaggtggcaatgctggttgccgcaggacagtttgctgttacatctgtgtgggaaaagaacgctgagatttgtgccagcttgatggcgcaggcggcggaaaacgacgcaagcctgtttgccctgccggaagcattgctggcgcgcgatgatcatgatgcagatctaagcgttaaaagtgcacagctgctggaaggcgaattcctcggactttacggcgagaaagtaaacgtaacatgatgacgacaattctgacgattcatgttcctagtacgccggggcgcgcatggaatatgctggtggcacttcaggcaggaaacatcgtcgcccgttatgccaaactgcatctctatgatgcatttgccattcaggaaagtcgccgtgttgatgctggtaatgaaatcgctccgttactggaggtggaagggatgaaggtcggtctgatgacctgttatgacttacgctttccagagctggcgctggcacaggcattacagggagctgaaatcctggtacttcctgccgcctgggttcgcgggccgctcaaagagcatcactggagtacgttgcttgccgctcgtgcgctggataccacctgttatatggtggcggcgggggagtgcgggaacaaaaatatcggtcaaagccggattatagatccctttggcgtcaccattgcggcagcgagtgaaatgcctgcactcattatggcggaagtgacgcccgaacgtgtgcgtcaggtgcgcgcgcaactgcccgtcttaaacaaccgtcgctttgcgccgccgcaattattatgatgtttttttactcggcgcttgattcaccttgttacagattgctattgtgtgcgcgcgtcgaatgaccgttaatattctctggtttttaaggcgcgttctgttgccggttatatgtcaagaaggtatctatgggtgagattagtattaccaaactgctggtagttgcggcgctggtcgttctgctgtttgggactaagaagttacgtacgctgggcggagaccttggagcggccattaaagggttcaagaaggcgatgaatgatgacgatgctgcggcgaaaaaaggcgcagacgttgatcttcaggctgaaaagctctctcataaagagtgacgtggcgagcaggacgctccctcaatatcttgttcgatacaaaaaacccgcttcaaaaagcgggttttttatcagacagatgtaagtaattattacaggattacttaacttccatccctttcgcctgcaaatcggcgtggtaagaagagcggacaaacggaccgcatgcagcatgggtaaagcccatcgccagcgcttcggctttcatttcgtcgaactcatccgggctaacgtaacgttgaaccggcaggtgatggcggcttggctgcaaatattgccccagcgttaacatcgtcacaccatgacggcgcaggtcgcgcattacctcaataatttcttcattggtttcacccagtcccaccatcagaccagacttggtcgggatttccggatgcgcttctttaaagcgttccagcagcttcaggctccagttgtaatctgcaccaggccgtacctgacggtaaatacgcggtacgttttccaggttatggttgaacacatctggtggcgttgcagtcagaatatccagagcacgatccatacgaccgcggaaatccggcaccagagtttcaattttgatttgcgggcttttttcccgaatggcagtaatgcaatccgcaaagtgctgggcaccgccatcgcgcaggtcatcacggtcaacggaggtgataaccacataacgcagcgccatatcggcaatggtctgcgccagtttcactggttcattggcatcaggagctaccgggcgaccgtgggcaacatcacagaacggacaacggcgggtacaaatagcgccgaggatcataaacgttgctgtgccgtggttgaagcattccgccaggttagggcaggaggcttcctcgcagacagaatgcaggccatttttgcgcattgcggctttgatgccctggatacgtgtagagtccgctggaagcttgattttcatccattccggcttgcgcagcagggcttcgcgctctgttgccacgtttttaaccgggataagggccatcttatcggcatcgcggtatttaacaccgcgttccatcacaatgggtttactcatagcgtgcgtgttccagttgcgaattacgaaggaaagcgtttcaattcaatagattgttgtaattatcaactatttttgaattaacgactggcagtatatcattgaaacggacctgaaagcagccaaagcggtcgcgaaaatgtaaaattgttgttggattgtgccattttatcgttctgcgctgtgatctggctgtaacaatactttttcaaaatgcattacggataacatctattactccgtgcaggatgggatcacgcaggctgaatttgttgtagtggatagagaaatctatttgctcctcatttaaggacggaaaaggcagtttttccagcggccagcagcggctaaacaggttataaaaacggctgggaataatcgctaacatgtcactgttggcaaccagtgcagcgattgtcaaaatgttgtagctggtgaaattgatttgccggtccggaaacatttcttgaactctctgccgcagaccgctgaaattttgctcttccggtaacagaagtacatgcgcagcgttgtcgatagtctctctgtcatcttctaaagagagtagtggatttccctcgcggcaaattaacaccatattgtcggtgaacagaacatgatgttgcaccgtacgattggtgcaaaacatgttatcgatgatgagatcggtttgaaactgactgagttggttttccgcgtcgctgatgggcgggttgcgcagtaaaagctgcggatagtgagttttaatcgcccgatagatgacaggaaggaccagtgctccgacgctgggagtggtcgcaatagttatcgttcgttgcttatcatagcttccttcgatatccagcgcgccaagaatggactcaaggccctgactgatatactcatgtagatgcatcgcaaatgcggtaggagtgacaccctggcctttgcgaataaacaatgggtcagggaatataacgcgcagtttctgaatagactgactgattgcgctgggggtcagattaagcactttcgctgcattaacgatccctttatgtacatatacagcttcaaaaatagtcagaaggttaagatcaatatttcgtaaggttgtaaatatttgtggtttaccttcactgctctttctgcttaaacagggttcaatttgattattactatccacgcacttactccaattttattcatggaaaaataatatttaaaaaattacaataatcttatgtctaattggaacggaacgcttttgctcaccataatcaactatttcaataggttaatcaatggggtgagttacggagcaaggcgtggcaccgcatttctgcaagtgataaagaaaatatacaaacgcgaaggagatgtaaagcattagcagatattatgagtaatgacccagtgtaaattgggccattgatgtatggaattaagcggtaatatattcgaagtccggattgtttagtagcgctaaaatattttccagtaaacgtggagcaatattattagtcgtcgcttcgggtttccattgacttattttagccatttccattccggcatacccacaaggattaatacgtaaaaatggactaagatccatattgacgtttaatgccagaccgtggaaactacaaccgcgtcgaatacgtaaacccagactgcaaattttcttttccccaacatagacacctggcgcgtcagcccgaggatgcgcttctatacccagttcagccagggtattcaccactgtttgctcaagcaaggtcaccagttcacgcacaccgagtttacggcgtttcaggttaagcaacacatacatcacctgttgccccggcccgtgataagtcacctgcccaccgcgatcgctctggatcaccggaatatcacccggcattaaaatgtgctccgcttttcctgcctgaccttgggtgaataccggatagtgctcgaccagccagatttcatcaagggtactatcatcgcgggtatcggtgaattcatgcatagcctgggagattggctcgtaaggctgaagaccgagctggcggacaagaattttatcctgatacaaaacggcatctccgtggagaatgagtaaaagtgggggaaaagtatatcacagcgaggagaggggagttacccgaccaggagccgggtaacggagaagcgagttacagaaccatgcggacaatatcgattttgcccagttcttcatacagtgtttcaacctgctcgatatgagtggcgttgatagtgatagatacgctgtggtagttgcctttgctgcttggttttaccgttggggtgtagtcacctggcgcatggcgctgtaccacttcaaccacctgatcaaccagctcaggtaacgcctgccccataactttgtaagtaaaaggagtagggaattcaagcagttcgttaagtttggttttcatgtcagctccggcgtaacgtaattaaatagcaactcccgccagaaggcgggagttttttactgatgcttagtatatggggacggaaattacactttcaagtgtttaatttttaaccaaaccagtgatggaacattaatttaatgtaatcaatgattttgccgaagaagttaccttccgggatttcttgcaacacaaccagcgggcgttgctcgatcgttttgccatcaagctggaagttgatagttccgacgacctgattcttttgcagcggcgcatgcaattcactgctgttcagcacatagctggctttcagatctttcatgcgaccacgcggaatggtcaggtacacgtctttatcaacccctaagctagcgcgatcagaatcaccaaaccaaaccggttcagaggcgaactctttacctactttcagtgggttaacggtttcaaagaaacggaagccccaggttagcagttttttactttcggcttcacggcctttaaaagtacgtccgcccattaccgcagaaatcaagcgcatctggccttcagtcgcagaagcaacaaggttgtaacctgctttgtcagtgtgtccggttttgatgccgtcgacattcaggctgttatcccataacaggccgttacggttcagctggcgaataccgttaaacgtaaattctttttctttatagatgctgtattcattcggtacgtcacggatcaatgcctggccgatcagcgccatatctcgcgcggagctgtactgaccatcagcatccagaccatgtaccgtctggaagtgggtatttttcaggcccagtgcgttaacgtagctgttcatcaagccaacaaaagcgtcctggctaccagcggcaaaatcggccatggcgacacaagcatcgttaccgctttgcaggttaataccgcggatcagctgagaaaccggaacctgcatgcccggtttgaggaacatcaggctagaacctttaaacaccgggttaccggtggcccatgcgtcgttgccgatagtgactaaatcagtttctttaaatttaccggctttcattgcctggccgataacgtaactggtcatcattttggtcaggctggcaggatcgcggcggacatctgcgttctgttcggcgagcactttgccggagttatagtcaatcaggatgtaggactccgcatcgatctgcggtacacccgggatcatagttttgatattcaggtcatcggcatgtgcagcagagataaaggctgtgcaaagagccgtggtgagcgccaggcgcttcatgatacgagcggaaaaaatggtattcatggtctgaactacgacatccgtgatggaattaaaaaagtgccctactatagcaaatgcactaccggcaggcatctgactttccgcgtgactttgttaacgtcatttacagaaattgacacatcagatgcctgctttacgttactgcgcggtagtaataaaactctgtaattgggcttcggtttgcaaacgttgctgcaaggtactggcttcggctttgctggcgaatgggccaagctggatccgccagaccgcgccattttgagttacgcgaccggggacgccgaacttctgtcccagttgctgttggtactgttgcgcacgagcctgatcgcttacggccccgacttgcaccataaagttgccgctggcgctttggctgacggcttgcggtgtcaccattgcagggctggttgcaggcgttgtgctcggagctgtaacaacgggctgtggcgcaggcgtcggttcgctgccttccagtacaccaggcgctaaggtcgttggtgcgccgaggaaaccgctactggttaccggcgcgccggtcggatcttcgctttttagcgtgctattactgaccggaagaatgtcaccctgcgggccagacacactacttgttcccgcgccaccgcttaaatcgggaggtgcaggcagggcgtaagtctgtttggcgactgtggtacaagccataccaggaccagaaaggctaccatcctgggcaacaataatcggatcgatacgaactttggtgttgttactcgtgttaagacggtcagctgccgcgcgagaaagactaataacgcggtcgttgccgtaagggccgcgatcattaatgcgcaccacgatcattcgcccgttagccaggttagtgattctggcgtagctggggatcggaagcgttggatgggctgccgtcagctgtgtcggatcgaatgcttcgccagaggccgtcaggttactgccgggttcggcatcatagattgccgccagtcccgcctggctaaatcgagacggatcctgcacgattttgtagcttttaccgtcgcgctggtaatcctgatttgccgtcgcgttcagtggttcgaaacgcgggtccgccccgctaatttcaactatagggccgttacataccgcaggctgcggtacacttaccgtctgttgctgaccatcatcgcttgtacatgccgcgagcattcctgccgcgatgcagatcccgagccactgcttacgcattgcgcacctcttacacgcttttgctcaacattttcctgtgggtgtggatactcattacaatcccgaacccagccatcagcacaattagcgcgcttcctccataactgaccagtgggagcggaacccctacaaccggcagaataccgcttaccataccaatatttacgaagacataaacgaataatatcagcattaagccgccagccatgacgcgaccaaaggtggtttgcgctctggcggctatccacagcccgcgcatgatcagcagaatgtagagagcgagcagaatcagaatgcccactaatcccagctcttccgccagtaccgcgaagataaagtcagtatggcgttcggggagaaattcaagctgactctgagtgccgtgcagccagcctttgccgcgtaatccgccggagccaatagcaattttagactgaataatgtgatagcccgcgccgagtgggtcactttccgggtccaggagcatcattacgcgctggcgctggtaatcatgcatcaggaagaaccacagaatcggaatgaacgccgctaccagcactactgcgacgccaatcagacgccagctaaggccagagaggaacagtacaaacagaccggaaagcgcaacgaggatacttgttcccaggtcaggctgtgcagccaccagcagcgtgggcataaatatcagcaccagcgcgatgccagtgttcttcaagcttggcgggcaaacgtcgcggttgataaagcgcgcaaccatcagtggtacggctattttggcaatttcgctcggctgaaaacgaacaataccgaggtccagccagcgttgagcacctttagagatggcaccgaaagcatctaccgccaccagcaaaataatacagatgatatagagatagggggcccagccttcataaacgcgtggaggaatttgcgccatcaccaccatgatgaccagacccatcgcgatttggccgattttacgctccatcatgccaatatcctgaccgctggcgctccagataaccagggcgctgtaaaccagcaatgccagtaagatcagcagcattgtgggatcgagatggactttatcccagaatgtttttttattcggattatccgtcatgattaatggtcctccgctgcggcaaccgctggattttccgcaggcagatcggtgttgttatcacccagcataatgtggtcgaggatctggcgcatcagtgtaccaaccgccggacccgcaccaccgttctccagaatcatggcgacagccacttgcggattgttgtatggcgcaaaggcggtcatcagtttgtggtcacgtaaacgctcggcaattttgtgcgcattataggtttcgttcgctttcagaccgaagacctgagcggtaccggatttcgccgcaattttgtacggtgcgctagcaaagtatttatgcgccgtaccgttagggcggttagcaacaccgtacataccgtctttcgccagctcccagtaaccggaatgaatatcgccgacgggcggttcatgcggctgtacccatggcacctgtttgccgtcttcggcggtgctcatcagcaaatgaggaaccttcacgataccgtcattaatcaggatcatcagtgccttactcatctggattggggtcgctgtccagtaaccctgaccgataccaaccggaatggtgtcaccctgataccacggttttttaaagcgtttctgtttccattcgcgggtaggcatgttgccggaacgttcttccgccaggtcgataccggtgtaatgaccataaccgaatttacccatccattcggagaggcgatcgatccccatatcgtaggccacctgatagaagaaggtatccgcagattcttccaggcttcttgtgacattcagacgcccgtggccccattttttccagtcacgataacgtttttcgctacctggcagttgccaccagcctgggtcaaacagcgtcgtattgcgcgtgatcaccccggcgctcaatgcgctaaccgccacatagggtttaactgtagacgcgggaggataaaccccctgtgtggcgcggttcaccagcggtgtattcggatcgttcaacaaggcggaataatctttgctggagataccgtcaacaaacaagtttgggtcataactaggcgtggaaaccagcgccagcaccccacctgtacgcggatcggtgactaccacagctgcgcggctacccgccagcagcgtttcaatatattgctggagtttgagatccagcgtcaggtaaatatcgtgtccggcttgcggtggtacttcttttaactggcgaataacacgcccacggttgttaacttcaacctcttcataaccggtctgaccgtgcagcacatcttcatagtaacgctcaatgcccagcttaccgatatcatgcgttgccgcatagttggccagtttgccgtcattattcaggcgttcgacgtctttatcgttgattttgctcacatagccgatgacgtgggtcaacgcgctaccgtaaggatagtaacgacgtttatagcctttaacttcgacacccggaaaacggtactgattgacggcaaagcgagctacttgtacttcggtcaggttagttttcaccggaatagaggtgaaacggtgactacgtgcgcgctcttttcggaatgcagcaatatcgtcatcggtcagatctaccacgctgcgcaaagcgtccagcgtttgctgcacgttatcgactttctccggcatcatttctatctggtagatagtgcggttgagggccagagggataccgttacgatcgtagataatgccgcggctgggcgcgataggcaccagcttaatgcggttttcattagagcgggtctggtagtcggtaaagcgaacaatttgcagattatacaggttggcgataagcacgccggtcagcagcaaaatccccaaaaaggcgaccagcgcccggcgcacaaacagcgcggactctgccgtatagtcgcgaaaagagttctgtagtttcatccgctgcgttttctactcaaagctcccttatcactcacggtgataaggatggttggtggtgatgctccacgcccggtacagactctctgcgaccagcacgcgaaccagcggatgggggagggtaagcgcgctcaggctccagctctgctcagccgccgctttacaggcagggctcaacccttcaggcccgccaatcagtagactgacgtcgcgaccatccagcttccagcgttccagctcagcggctaactgcggcgtatcccagggcttgcctggaatatcgagggtgacaatgcggtttttgcctgcggccgccaacatctgctcaccctctttgtcgagtatgcgcttgatgtccgcattcttgccgcgttttccggccggaatttcaatcagctcgaagggcatatctttcggaaaacgacgcaggtactcggtaaaaccggtttgtacccagtccggcattttcgttcccacggcgacaagttgcagcttcacgcattaactccagagtttttccagttcatacaggcgacggctctcttcctgcatgacatggacaatcacatcgcccaaatccacgacaatccagtcggcgctgttttcaccttctacgccgagcggtaacaggcccgctgcgcgagactcctgcacaacgtggtcagcaatggacataacatgacggctggacgtacccgtacagatgatcatgcagtcggtgatgctggatttgccctgaacgtctaaggcgatgatgtcctgacctttgaggtcatcaattttgtcgataacaaaatcctggagtgctttaccctgcaagttttccccctgggtgaatcaaatagataaaaatggtctgtcagtatacctgaaccagaggcgatttcgggacaattgtcgccgaatcggctttcgaaagtgggctatcatcccaccccgcgccgcagattgcatcgccatttttgtaaaacaatttctacaaagtcgtgtctggcggaaaaagtctggctgcggagaatatcagcctgcccgggtctgtcaatggtcgttgcggcttacccgtaaaaaaacagaaaagtcatgcattctcgaccccgatggcacggctattgaggacgcgtagcgtcgcgaatttttggttgatatcaatggcgctccaacacccctggtcaacgcgaaaatgccacatagcttcggcaggcatgccaattaaacgggcgattaacagactcagtacaccctgatggctgacgactaaaatattctgatagtgctgaaattcactaagccttgcgataaagcgttccacacgttggctaaatgcctgaaatccttcaccgttcgtggggattgcatgctgccagtcattgcaccacgcgctatagttttcggcatcttcttgcatgaggtcgcgatgatgtcgcatctcccagtcgccaaaaaacatttcgttgagttcaggtatgatttgcacggggagctggcggtcactgagaaccagtcgcgcggtatgctgtgcccgttccagttcactgcataaaaccagatcaaaggaaacaccatgtagcagcgtatgcagattttgcgcttgctcaataccgcgcgcggtcaggggggtgggcgcatgaccgctgtaaagaccatcgatattcgcttgcgtttcaccatgacgaattaaccacagtcgcatcatgccctccgtaacgacaggtatcagcgatacaagccttgttggttaatgtaagtcagtaccggttccggcaataaatcctcacaactttcaccgttttgcaaacgttcgcggatgatggtcgcgctgatgttaaaccacggcgtttcagccagataaattttaccggcaggctgaaggtgaagatcttccgggttatgtgtcaaatgatcttccagccattgctggtattgcggttgcgccatttcaagtgggtaacctggacgccgacagacgatcaaatgtgcattgtcgagtatcgtttcgtattcgtaccaggtcggaaaggtcagcagactatcctgaccaataataaacgccagcggcacgtccggtccttgttcctgccgccactctttcagtgtttgcgcagtgtaagagggggcattgcgctttagctcgcgttcatcaagagtaaataatggcttgtcggcaatcgccagttcaagcatgtgtttacgctgcacgctgttcgcttccggctggggacgatgcggaggaacattattagggatgattgtgacccgcgtcagaccaatcaaattcgccagcgtttccacgggttttagatgaccatagtgcaccggatcaaaggtgccgccaaacagagcctgtaaagatttcatatcaaccgtcgataaatacgtccgccaggggtttatggcacaacagaagagataacccttccagctctgcccacacactctgaccgtaatcttgtttgagggtgagttccgttcgtgtcaggagttgcacggcctgacgtaactgcgtctgacttaagcgatttaacgcctcgcccatcatgccccggcggttctgccatacccgatgcttatcaaacaacgcacgcagtggcgtatgggcagactggcgtttcaggttaaccagtaacaacagttcacgttgtaatgtgcgcaacaaaataaccggttcgctgccttccagacgcagttgctgaagaatatgcaatgcgcgcttactttttcccatcaacaaagcatcaacccaatgaaaaggggtgaaatgcgcggcatcattcaccgcctgttcaacgcgcggtaatgtcaatttgccgtctggccagagcaggcttaaacgctccagtgcctgagccagcgccagcaggttaccttcataacagtagcagagcacctgatttgccgcgtcatccagttctaagttgagctgttttgcgcgcgcagcaacccagcggggaagctgagcctgctccggtgtctgacaggtcacctgcacgctgcgattcgcaagcgcagtaaaccaggcggcattttcttgcgctttgcttaatttattaccgcggacgatcaacagcaggtcgtcatgcagaagtccggtgagtgtgagaagttgctcattgatcgccgcattcggtccgttttctggtaacaacagcaatagcgtttgtcgactggcaaacagactcatagcctggcataagctaaagatcgcattccagtcagtgttgggatcaatggaaaaagtgtggtgttcttcgaatccttgtgccgcagctacctgacgaacagcgtcctggctttcctgcaataacagaggatcgttaccaagtaaaagatacgccgcgcgcagcccttcattgagctgcgcgcggagttgttccgggtacaaccgaatcatcagttacccagcgtggtggagacgcgtgcaggcgttgccggagtatccgttgtggtgctcgtctgttcttcgtcggaacgaatatccgcagcacggatgcttggcagcttacgaatcagctgttcggcagcacggtcgtacatctcttttacgatcatgtcttgttcgttatctttcgctaacgccatttgcgggttatcgaagaagctacggaagactttggcgctaatcgggtagatatcacggccggggatcaacacggtcgcattaaccgtcatgatcatctgatactctgctgtttgaccgttacggaatacgcttgcggtatctttcgcgatgctcactttacccaaacgcaaggatggaacgtccttacgcgtggtttctttatcaagcaactcgacaccattcagacgtaactggttacgcaccgcacggcttaatggcccgttcggatcgccactgtccaggatcatgaccttcatagtggaaggaacctgcgtggtatcacgcagatgccagccacacccggcggtgattaacaccgccagagataacaacaatgttgccagatatcgcacgcttcctcccgcgcttagccaacgaccagattgaggagtttacctggtacgtaaatcactttacgtacagtaacgccatcaagatattttgctaccagatgttcctggccagcacgttcgcgaacctgttcttccgttgcgtccaccggaacggtgattttggcacggactttaccgttaacctgcaccacgaccagcgtggagtcttccaccatcgctttttcgtcagcaaccggccacggcgcgttgtcgatatcgccttcgcctttcagttcctgccacagcgtgaagcagatgtgcggggtgaacgggttaagcatacggacaacggccagcagtgcttcctgcatcagagcgcgatcctgctcgccatcggttggtgctttcgccagtttgttcatcagctccataatcgccgcaattgcggtgttgaaggtctgacgacggccgatatcatcggtcactttagcgatcgttttatgcacatcgcgacgcagcgctttctgattttcagtcagcgcatcaacgttcagtgccgcaacatcaccttttgctgtgtgctcgtaaaccagtttccagacacgtttcaggaagcggttagccccttccacaccggattcctgccattcgagagtcatatcagccggagaagcaaacatcataaacagacgaacggtgtccgcgccgtaacgttcaaccatcacctgcgggtcgataccgttgttcttgctcttggacattttgctcatgccggtataaaccagttcatggcctgccgcatctttcgctttcacgatacggcctttctcgtcacgttcaacgatagcatcaaccggggaaacccagttacgttcgccgttttcgccaacatagtagaaggcatctgccagcaccataccctgacacagcaactgtttcgctggttcgtcagagttcaccatgcctgcatcacgcatcagtttgtggaagaagcggaagtagagcaggtgcataatggcgtgttcaataccaccaatgtagatatccaccggcagccagtagttagccgcttcggaatccagcataccttctttgtactgcgggcaagtgtagcgcgcatagtaccaggaggactccataaaggtgtcgaaagtgtcggtttcacgcagtgctggcataccgttaacggtagttttcgcccactccggatctgctttaatcgggctggtaatgccgtccattaccacatcttccggcaggatcaccggcagctggtcgtccggggtcggcattacggtaccgtcttccagcgtcaccatcggaatcggcgcgccccagtaacgctgacgggaaacaccccagtcgcgcaggcggtagttcactttacgctcgccaacgcccatcgcagtcagtttatcggcgatggcgttgaaggccgcttcatggtcaagaccgttgaactcgccagagttgaacagcacgcctttttcagtcagggcttgctgagaaagatctggctcagagccgtcagctgccaggataaccggtttgatgttcaggccgtatttagaggcaaactcgtagtcgcgctggtcgtgccccggtaccgccataactgcgcccgtgccgtactccatcaatacgaagtttgctgcccaaacgggaatttcttcgcccgttaatgggtgaaccgctttaaagccagtatcgacgccttttttctccatcgtcgccatttcagcttcggcaactttggtgttacggcattcgtcaataaaggccgccagttcaggattattttccgccgctttctgcgccagcggatgacccgcagctaccgccaggtaggtacaacccataaaggtgtccgggcgggtagtgtaaacggtcagcgtgttgtcatagtcgttaacgttgaaggtgatctccacgccttcggaacgaccgatccagttacgctgcatggttttaacggtgtctggccagtgatccagtttatccagatcgttgagcagctcgtcagcgtaagcagtgattttgataaaccactgcgggatctctttacgttcaactttggtatcgcagcgccagcagcagccgtcgataacttgttcgttcgccagtacggtctggtcgttcgggcaccagttgaccgcagaagtcttcttatataccaggccttttttatacagctcggtgaagaatttctgttcccaacggtagtattccggcgtacaggttgccagctcgcggctccagtcataaccaaagcccagcattttgagctggtttttcatatacgcgatgttgtcgtacgtccacggtgccggagcggtgttgtttttcaccgccgcgccttccgcaggcagaccaaacgcgtcccagccgatcggctgcaggacgtttttgcccagcatacgctggtagcgggcgatcacgtcaccgatggtgtagttacgtacgtggcccatgtgtagtcgaccagaaggatagggaagcatagacaggcagtaatacttctctttgctctcgtcttcggttacttcaaatgtgcgcttctcatcccaatgaagctgtactttggattctatctcttccgggcggtattgctcttgcatggcagccagtggtcctgttttcaatacggctacaaatgtagcgttgaggtggtttttcagatccgcatagcatagcccaaacgtccgcgtcaaaacagcctttcgcgcactcgacgttgaaatgatgcccggattattcatacattaatttacagagtttgtgggcgtattagcaaagcaaggaacaaagaacgtctattattatagtcagttaacgacccgggagatgaaacgatgaacaaggttgctcaatattaccgtgaactggttgcgagtctgagcgaacgcctgcgcaatggcgaacgtgatatcgacgcactggtggaacaggcgcgcgagcgcgtaataaaaacaggggagttaacgcgaaccgaggtcgatgagctgacgcgagctgtcagacgtgacctggaagagttcgccatgagctatgaagagagcctgaaagaagaatctgacagcgtctttatgcgggtgattaaagaaagcttgtggcaggagctggcagacatcaccgataaaacgcagcttgaatggcgcgaagttttccaggacctcaatcatcatggggtttatcacagcggagaagtggtcgggctgggaaatctggtctgcgagaaatgtcacttccatctcccgatctacacaccggaagtgctgacgctatgcccgaaatgtggtcatgaccagttccagagacgcccgtttgagccgtaatagtctgatttcgcacagcaataaagagaatatgggccgaatgaaattccccggcccttgtttttatctttacagtaaatcttcagtctcacgaatttcctgactgacatctctggttccggaactctgaactttacgatacaggtcgagagcctgtcggagatcgacaggtcttccttctccgtagtgatacataatggccaggttataccaggcagtggcgtcattgcattcagcggctttcgtaaaccattcaaaggcagcctgataatctttctcaacgccttgtccgtgtttatacatataaccgatgttgacgtaagcgccgacgctcccctgagcggcagccttcagataccagtacatcgcttgcttatagtcctggtccaccccttcgccagcgttataatcccatgcaatttgaaactgggcgtgccgattaccctgctgtgcgcttttcaaataccagaatgcggcgagtgtcttgttttgagcaacgccttttccgtcttcataaagatcggccagattgttttgcgcgtcactatggccttgtaatgcagcttgtttgtaccagaaaaatgccagcgcatagtcttttgcgactccgttgccatttctgtacatccacccaagattattttgcgcataagacattccgctctccgcggctatctgataccagacaaccgcttctttataattgggggcttctccacgatccagtgtccagccaagggcgttggaagcgaaagtatggccttgtagggcagcttttttcagccagaagatggcttgctcattatctttatgacggcttttatcctcggtatacttttgccctaaggaatactgtgcttcacaatgaccttgctcagcggccagcttcagccagtaaaaggctttttcgtcgtccggagaatcaattgcgctatcgcgattataataaaacccaacaatatattgagcctcgcaatcgcctttttcagcacgttcgataatctcatctatacttaaattatcgcagcaactactcgtgaaaatcattatcatttccttatggttgcagataaaacatattatatttttatgtgttccatttttgcgtaagccttattttatgcgtattatgtcgcgtcagaaaagtataaataaacgagcctcgcaatgcggctaatattcatttaatgaatatttaaggataaattatatggacatggagagccaaaaaatattgtttgcactttccactccgatggaaatacgcaatgaatgctgtttacctagccatagtagtcccaaaatgtatttaggtacatgcttttttgacctttcttccagttggggaattgatgaccgtgatgacctgctgcgcacaattcaccgaatgatcgataacggtcatgccgctcggttggcagggttttatcaccgctggtttcgttatagcccatgtgaatggcgtgactatcttgctgaactaaatgagcaaggtcaggcttatgcgcaatttgtcgccagcaccgccgaatgctgtggcgaagggggaatcaaagcctgggattatgtccggatgggttttttaagccgaatgggcgtacttaataactggttgagcgaagaagaaagtctatggatccagagccgcattcatctacgggctctacgttattatagtaactggcggcaatactttgccggttatacctttggtcggcaatattggcagtctcccgaagatgatcatctgcctttattacgcgaattcttagcgcgtaaagaatacgacgattccggcaatgatatgttttatcaattatttgccagtgatgatgcgtattaccctaccttgtcctggcaaccattggcttactattctgcatgcccggaaacgcttaaggatatgagcgacctatgaaaaattgctggaagatcctcgatatagaggaaacgactgacgtcgatattatccgccgcgcttatctggcgctgttaccgtcctttcatccagaaaccgatccgcagggttttaaacaacttcgtcaggcgtatgaggaggcgctacggattgcgcagagccctgctaaatctgtttggcaaccagaagaatatgaggtagcagaacatgaaattctgctcgcctttcgtgcgttacttgcctctgatagtgaacgttttctgccctccgcctggcagcgattcattcagcaattaaattattgcagcatggaggagattgatgaattacgctggagcctgtgcacaatcgccatgaacactgcccatttatccttcgagtgcgtggtgttattagcagaaagattgcggtggttacaggaggaaaataccggggaaatagacgaagaagaactggaatcctttttatatgccattgcgaaggggaatgtttttaacttccagaccattctgcatctgcccgttgccgtgcaaaatgacaccatcgatttttaccaaatgttcgctcggatttggagtagccatccacaatggctgacattgtatttagcgcaacatcgcgcagtgattatccccgatgatgcaaaactgcacagaaatttactccgctggtatagcgcaggtcgcctggatatccccgaacttctggattacgcccagagttggcgggaaactgaacctgataatgaagatgcgccttattatgaatacgcgcaacgcgtctattgtggagaaggcgaaagcctgttggcagaactttgtgactactggcgcgagtatccctccacccaggcggatgctttaatgttgcaatggtgccgtcagcatcgggtcgattattacccattactggtgatgatgattgaagcgcgtgatctggttaacgatcagggaaaaccgctactttatgtccccggcgacagcgcccgtacgcgttttcatttatacgaaatactcagcgatgaaaaactctctgcgctggggcgtagtctggtcgagatggttttgcacaaaggacgtaagccgcggatcagtctcacgcgtgatacagaacataccttatggccattatatctagttgccaaacaattagtgcaggcctgccaacctacagaagaaagtttaatgccgattgtgagccgccttgatgcagaaaatcgttgtccactggaagcattaattattcgtcgattattaattcaggcggcgaattttaccgagaagcaaactgttgaaccggagccgcaaccgcagccaatgcccgttgacgatggtgggccaggctgtctgggcatcattaaaattattttctatatttttatctttgctggtttgatagggaaaatactccatctgttcgggtgacagtcgacgttaatgtgcgggaagcccggcaagtaatctttccgcatttttgtaatgttgtttggcggtcagttttaaccatttttgagattcataatggttaacattaataccactgccatttctgtagatcaaacctaaagtatattgagcatgagcatacccttgttcagctgcttccttataccagagaattgctttacgggtgtcgggtttgacccccagacctttgaggtagatccaccccagtttactttgcgcgcgtggattttcctgttccgcactttgctcataccagtatctcgcctgtgtataatccagtggtttaccgtcgctaccatgaagataaaattctccaaggcgatattggctcgtactgtgaccatgaatcgcggaaagctccgtggctgccgtggtgaatggaagactgcccggactgcttaaataatcaaaggcataattcaccatggctttatcacgcaacgtcgttttcttgggttggctaatacaggtaattgctgcaactataaaaattgcgaatatatacattaattttttattcatgtgtgaatgcttcgattttctttttattttgaaagcgtcaagtttatactcatcaataataaaaaagtagtcagttaatgcacttaagggattattaacaaatgaataaggaagaacaatatcttctttttgcgctttctgcgcccatggaaatacttaatcagggttgcaaacccgcgcatgacagcccaaaaatgtatactgggataaaagaattcgagctcagtagttcctggggaataaataatcgtgatgatttaattcagactatttatcagatgactgatgatggtcatgccaatgatttagctggcttatatctgacatggcatcgctcttcccctgaagagtggaaagcattaattgctggtggcagcgagagagggttgatttatacccaattcgttgcccaaaccgctatgtgctgtggggaagggggaatcaaagcctgggattatgttcgaatggggtttctgagtcgggtcggtgtgctcaacaagtggctgacggaagaagagagtttatggctgcaaagccgcgtctatgtacgagctcaccattactatcacagctggatgcactatttttccgcctatagcttaggacgtctctactggcaatcttctcagtgcgaagacaacactagcctacgcgaggcgctaaccctgtacaaatacgatagcgccgggagtcgtatgttcgaagagctggcagcgggaagcgatcgtttctatgccacgcttccctggcagccattaactgtccagtctgaatgcccggtaacgcttaaggatgtgagcgacctatgaaaacatgttggcaaatcctcgaaattgaaagcacgacgcaaatagacattatccgccaggcttatcttgctcgcttaccgttgtgtcatcccgaaaccgatccgcaagggtttaaagcattacgccaggcctatgaagaggccctgcgactggcggtaaatcctgtcgaggaagcagatgatgaagaaaaagatgctgccgctgaacatgaaatactacgtgcattcaggacattactggatagtgaaagtgatcgttttcagccttccgcctggcagaaatttattcagcaattaaatacctggaacatggaggatgtcgatcaattacgctggccgctgtgtgcaatcgccatagaagcgcgatatcttagtttaaattgtgcttctttgctggcagagcgtttgaactggcatagttttaatgacagcgaaggaatggatgaggaagaaagggaggcttttcttgaggccattcaggctggtgattgtttcgatttccttagccttctggaatatcccattgcgttgcagaaccagactgttgagtattacttcgcgctggaacgttgctgccgttaccatcctgactatgtcactgcgtttttggcgatggaaggtccgtggttaattcctgatgatgcaaagttacatcgcaaactgttgcgctggtacagcagcgtgcaaacaggtatggcggaactcattcctgtcgctcaacagtggcaaacggaagaaccagaaagcgaagatgcccggtattacttgtgtgcacaacgtttgtactgcggcgagggggaaagcctgcttgccgatctctgcgcgtactgggaaagttacccatctacacaagctgataatttgttgttgcagtggagcaagcgtcattgcccggattatttcgcgttattagtgatggttatcgaagcgcggagcatggtagatgcgcaaggtcaaccgctgaaatatgttcctggtgagagcgcccggacgcggctgttatgggcggagattttacatagcggaaaattaagcccgttaggtcaaagctttattgagagcttattcttcaagcgcaaagcatgggcgtggtggaaaagcagagtcggtagcgagacagagcaagatagtccgttcctggatttgtatcgggtagcggaacaggtagtacttgaagcgtttccgaaacaagagatgctggcccgtcttaatacaaggctggaaggcggagatgctcatccattagaggccattgtcacccggatgcttttgacgaaagtgaaactcgagccggaggatgaagatgtcgatgagccaacacctgaaaatcatgaagaaaaaaatgatgagggtgaaaaaccacagagcattaccagcattatcaaaatcagtttaacggtgctggtgataggttatgctctcggcaaaatcgcgatgttgtttagctgacgatgtgttttttgcgccgatgccggatgcagcgtttacgccgcatccggcagccgtgtttatgggatctcaatggctaaataatcgctcgcccgccgccgaacttcatccacgcgggccatatcgttactctgcaacgccgcatcaaaatcggtgatcacccggccgatctcttctcgctcgtcacccagcgcccgcgcccacaactcttccagtttggctttaaaggtgcgattgatgagcatatcgcgcggataaattttcaatgcggataaccgcgtccgactctcttcaatctgctgcgcgctcaatgttaccgggctgtggttaatcactctggacttaacgctgccgtcttccagaagcacgtcaacttcaagcaacccgttgatatcataactaaagcgaatatcaatgctctgataagccccggttttcttcaacggcacatcgaaggattccaccagaatgttgtttttaactttgtggttttctccctgatagacgttaaccgtaatactatcctgttccgggtgcatggtactataagtttctacacggctcacgggcacagtggtgtttcgttcaataatcgggctgaaaatgccggaaacgccctggcggttaacttcaacgcccaagctgtaagggcaaatatcagtgaggattacctcttcaatatcttcactgcgtaagcggcaggcggcctggattgctgcgcccagcgcgacaatggtgctcggatcgtaactttgatacggtaatttgccaaacagacgcacggcgattcgctgcaccagcggcatttgactcgcgccgccaaccagcaccagactgtcgatttgactcggcttcagacgcgcatcgcgcaacgcctgttcaatcggcactcgcaagcgattgagcagcggcaaccacaaatcttccagttcgttctcgtaaaattcgcattcccgcgtttcttcctgatactgccagcgaatgtgcaatgggctttgattgctacattttgccgcttccacacaggcgtacaaggctgccagttcactctcgttaagcgtggtcctggcgacatccgcgcgttttaaaacctcatcgaccagcatatgggtaaaatcttcgccaccaagaaagttgtcgccagcggaggcgtgaacttcaatcaccggcgtggcgtactcaagcaccgtaacgtcaaacgtgccgccaccgagatcaaacaccaggctacgggtattttgttgggtatgcaggccatacgccatcgcagctgctgtgggttcattaattaagcgtaccgcatttaacccggctaactccgctgctaaacgggtatgcttgcgttgttcatcgctgaaataagccggaacggagatcaccacatctttaatcggacgttgcagaaattcttcggcatcttcttttaaactgcgtaataccaaagaggacagttctggcgcgttaaatgtgtcgctgcctaaccgccagttggtattactgcccattgcacgtttaaataacgctgccgttttatccggatggctagtacgccgacttacagccggttttccgactaaaatatgattattttcatccatgctaattatggatggtgttaaatattcaccgaacttatttggaattaattgcgcggcaccgtctttccagacggcaattaaactattggtagtaccgagatcgataccaatggcgagttctgcattatccattgcatttatatcttgaaagaaaaagagataaacagattaagaccacccaggtaacgcgtggtgatcttaatcaatgacgtgtgttaagcgtaaaatttcagacgatcagccagtaaatcaacaaagccctgacgatcaacatcgaccattacggtggcattcggtttattgcctgtcagataataataatcaacaaccgtcataccctgggtatatttcccctgtgtttccacgccaacccagcgctcaacagaggtaaataactccggtttcaacagccaggcgatggtgcatgggtcatgcagtggtgcgccgacaaagccccatttttcgtctttatgatattcgaggaagaaatccagcagttcggcaacaatggtactaacagggttaccaatcgcgcggaaacgctcggtgtcttcaacgtggatttgtgctttatgagtaacatccagaccggccatcaccaccgggatcccactctggaagacaatttctgccgcttccgggtcaacgtaaatattaaattcagccgcaggcgtccagttacccagccccatagcgccacccataatcacgatacgggcaattttgctatgcagttccggatggctattgagcagcaaggcaacgttagtttgcggtccggtagacacaatggtgacaggttccgcactttcacgcagcgttttcgccatcagctctaccgccgtacagttttgcggtgcgaatgtcggttccggtaatgccgggccgtcgagaccgctttcgccgtgcacattgtccgcgataatcaactcacgcattaacggttttaccgcgccgcctgctaccggaatatcggtgcgattaagcaaggtcagcatacgcagaacattgcgtaaggttttttctggtgtctggtttccggcggaagacgtaattgctttgacatcaagctctggactggcgagggcgagaactattgcgatagcgtcgtcatgacctgggtcgcaatctaacagaattggcagtgccattgttgctccttgttgtgtgcttctttgcgacaagggtaacgccaggatgtaacagatacgaggggcgaaacgataaagcgtgagatggcgcgcaattgggtatgcgcgccagagtgattaatgcaggattttcgcgaggaagtcttttgcgcggtcgcttttcggatcatcgaagaaagcgtctttcgggctgtcttcgacaattttaccctcgtccataaagatcacccgattcgccactttacgggcaaagcccatttcgtgggtcaccaccatcatggtcattccttcgttcgccagttccaccatcacgtccagtacttcgttgatcatctccggatccagcgcgcttgtcggttcgtcaaacagcatcgcaataggatccatacacaacgcgcgagcgattgccacacgctgctgctgaccgccggaaagctgcgccggaaacttattggcgtgagcagaaagcccgacacgctccagcagtttcagggctttttcacgagccggcgctttatcgcgtttaagcactttcacctgcgccagggtcaggttttcgataatgctcagatgagggaacagctcgaaatgctggaataccatcccgacgcgggaacgcagctttgccagatcggttttcttgtcgttaaccacgataccatcgacggtgatttcaccttgctgcaccggttcgaggccgttgacggttttaatcagcgtacttttgccggaaccagacgggccgcaaaccaccaccacttcgccttttttcacttcggtactgcagtcggtcagcacctgaaagtgaccataccatttactaacatttttcagggtaatcattatgctgtccttcttttcaagtagctgaccaacaagctcgcgctaagactaataacgaaataaacaaatccggcaaacaggatcatctcaacctgcgtaccatcacgctcaccaatggtactggcggtacggaagaaatcggccagggataacacatacaccagactggtatcctggaacagtacgatgccctgagtgagcagcagcggcaccatcgcgcggaacgcctgcggcagaataatcagtttcatgctctgccagtgagtcattcccaacgccagcgcggcgctgctttgaccacgagaaatactttgaataccagcacggataatctcactatagtaggccgcttcaaacatgctaaacgccaccatcgcgctaattaaacggatatcattttttgggcttaatcccagcacgttttgcagaaaacccggcacgatcaggtaaaaccacagcaaaaccataactaaaggaatgctgcggaatacgttaacgtaggctttggcaaaccacgccacgggcgcaaagctggataaacgcatcaccgccagcatcgtgccccacaaaataccaatcactaccgccgtgacggtgattttcagggtgatcaccagcccgtcgagcagatatggcagggaagggacaatggaactccagtcaaactcgtacattatttgccccccatgttgccaggcaggcgaactttacgttcaaccagcgtcatcaccagcatgataaaagcgttaatcaacacatacgccagcgtaatggcggtaaagctctcccaggcatgggcactgtaatcgagcaatttacccgcctgcgccgccatatccaccagaccgatagtgctggcgatggcggagtttttcaccaggttcatcatctcactggtcatcggcgggacgataacgcgataagcattaggcagcagtacgtatcgataagcctgcggtagcgtcaggcccatcgccagcgcggcatttttttgccctcgcggcaggctctgaatcgcggcgcgtacctgttcgcaaacacgggcggcggtaaacagccccaggcagagcatggaactaaggaaaaactgaatattgggatccagctcggccttaaaccacatgccgattttctccggcagcagctccgggatcaccagataccaggtaaagaattgcacaatcaacggcacgttgcggaacagttcgacatacaacgtacccagaccagagagaaaacggtttggaacggtacgtaaaatgccgaaaaaactaccgacgaggaaagcgataatccaggcgcagatgctcaaagcgatcgtcacctgaaaaccactccagatccaaccaagataggtggtgttgccgaacggggcttgttgtaaaaaaataccccagttccagtctatagacataaatctactccagaaaaaagagggtagcagcgttaactgctaccctcgaagattgttacccagcgtattgcggttttcaggcccgatggggaacgaccatcaggcgtatagtctgtccgtgctacgtaacaatcgagagggctggaatttccgcccctggttcttgtaattagttcagtgccttgtcattcggttctttgaacagtgctttcatttcgtcactcagttcgaaattcatgttcaggtttttcggcggaattggatttttgaaccacttatcaaaccatttttccgcttcaccggaggtctgcacctgagcgatggtgtcatccatcagctttttgaactgcggatcatctttacgcaacatacaaccgtaggcctcctgagactgcggcttgccgacgatttcccagttgtctggtttcttcgctttcgcacgttcaccggccagcagagcgtcatccatcataaaggcaacggcacgaccgctttccagggtgcggaaagagtcaccgtgatctttggcgctgatgatgcgcatattcattttttgctcttcattcagtttgttgagcaaaacttcagaggtagtgccggaagtgacgactacggctttgtctttcaggttggcaaaatctttgatatcgccaccctttttggtcaacaggcgcgtaccgaccacgaaaatagtgtcagagaaagccgcctgtttttggcgttcgacgttgttggtggtagaaccacattcaaaatcgaaagtgccgttttgcagcagtggaatacggttttgactggtaatcggaatcagttttacctgcaagtccggtttgttgagtttctttttcactgcttcaacaatggcgttggagtaatcctggctgtaacccaccactttttgctgattgtcgtaataagagaaaggcacactagattcacggtgaccgacgacaatcacaccgtttttggcgattttgtccagagtactgcccgctgccggggcggcgtcatctgcctgtgccagtcctgcggaaagcgccagggcgaggattgctgtggcaggtttacgtaattgcatatccaactcctttatcttctgcgttaagaacgcatggatacccgttgtgagtgtttgtgttgttatcgtctgcaactttattgtgcagtgttgtgcctgttagggaaggtgccttaggtaacatttagtttggctaaatgtaaagatattgctgttttattgtttgtttttgcgagatgcgccgcaccattccgaagcaaaattcttaaaatgcactcttttagtgctaccgctggattactgtggtgcaactaggttgtactgatgctgtttcagggtttgccttgtataacaaagcaatagatgtgccaaagttggataggagaatattgttatccggataatgcactgatgccgcatccggtgagcgtgccgaaatatgggatgtattccggcacgataagaagggattatttacgtcgctgacgcagactcatcaacacagcagcaaaaccaaacaatgccgtcagcacccacagcggccagttgccggtacgtgcgtatggtgtgagtccggtggtcggcgtcacgttagtggttaacacctcgcgggtgaactgcgggatcatcgcctgaatctcaccctgcgggccaatcaccgccgtaatgccgttgttggtgctgcgcaacagtgggcgcgccagctccagcgcacgcattcgcgccatctggaagtgttgccatggaccaatagatttaccaaaccacgcatcgttggagatagtcagcagatagtcggtatccgggcggaagttatcgcgcacttgctcgccgagaatgatctcgtagcaaatagccgcagtaagctcaataccatttgcgctcagcggcggctggatatatggcccacggctgaagctgctcatcggcagatcaaagaacggtgctaacggacgcagaatgctctccagcgggacaaactcgccaaacggcaccagatggtttttgttatagcgatcggcactttcgtagctgtacggcgcacctttacccagcgtgatgatggtgttgtaggtatcgtagcggttctgcttattgagacgcgcgtcgacaatcccggttaccaggctgctacctttatcacgcaactcaccgtccagtgctttgaggaacggttgctgattaatttccagatcggttatcgcgctctccggccagataatcaagctacttttgcccatcagcggtgccgttgcgttgtagtaaatcttcagcgtattaagaagctggccttcgtcccatttcaggctttgcggaatatcgccctgaaccatgctaacctgaatggttttctccggttgtggggtaaaccactggatgtaacgcagcgggaagggaagggcaaacagcacgacggccaccaccagcggacgccagttgcgtttgaccaacgccagtgccagcaggccactaaccatcatcagcaggaagttaatggcttccacgcccattatcggtgccagcccttttaacgggccatcaatctggctatagccgaactgtaaccacgggaagccggtcagtacccaaccgcgcagaaactcggtcacttgccagagggcaggggcggcaatcgctacgcgcagccaggtggttttcggccacagacggctcagcacgccagcaaacagtccggtatacaggctcaaatacgccgccagcagcaccaccaggaagatgttaaccgggccaggcattccgccaaaggtcgcgatgctgacatagacccagttaataccgctgccaaagaggccaaatccccagcaaaagccaatagcggcagactggagtggacggcggttaaaggtcaacgcctgaagccccatcaggctaataatcgccgcaggccagacgtcgtaaggagagaaggccagcgttccgcaggcaccgaataataacgccagcagcaggcgaatgcgctggcgttcaattaaactggcaaaagccatgtagttatctatccagtttcggttttattcatccagcttcggctggggactgtcatccgggattttgacatgaacctgaataatacgccgactgtcggccatcgccactttgaactggtaaccgtcgatgtcgatagtttcgccacgcgccggaagatgcccaaatgcctgcatcaccagaccaccgatagtgtcgacttcttcatcgctaaagtgggtgccgaacgcttcgttgaagtcttcaatggaagccagtgcgcgtacggtccaggtatgacgactcagctgacggaagtcgatatcatcttcttcgtcatactcgtcttcaatctcaccaacaatcagttccaggatgtcttcaatggtcaccagaccggaaaccccaccgaattcgtcaataacgatcgccatgtggtaacgctgagagcgaaactctttcagcatccggtctacgcgcttactttcaggaacgacaaccgcctgacgtaacactttgtccatgctgaaggcttcagcatcgctgcgcataaacggcagcaagtctttcgccatcagaatcccttcaatgtgatctttgtcttcgctaatcaccgggaaacgactgtgggcggactcgatgatgacatcaagacattcgtccagcgtctggttgcgtttcagggtaatcatctgggagcgggggatcatgatgtcgcgaacgcgttggtctgcgatgtccatcaccccttcgagcatatcgcgcgtatcttcgtcgataaggtcgttctgcccggaatcacggatcagcgccagcagttcgtcacggtttttcggttcaccgtggaaaagttggctgagtaacagggagaaaaatcccttcttgttgcttatcgtgtcactactgtgactattgtcgtcgctcatggcgtcgtatgggttctcatgttagttaatcaaaacgccgtcgttaatcaccaacggcggggacgtctgccagtcaaatgcctggcaaattattctttctcggcaatgtacggatcctcatagcccagagcaagcataatctctgtttcgagggcttccatttcttctgcttcgtcatcttcgatgtgatcgtaacctaacaaatgcagactgccgtgcaccaccatatgcgcccagtgcgcctccagtggtttgccttgctcctgagcttccttctcaaccacctgacggcagataaccagatcgcccagtaggctcatttccatgccaggcggcacttcaaacgggaaggagagcacgttggtcggcttatccttaccgcgataggtcagattcagactgtggctttcggcggtatcgaccacgcgaatcgtcacttcgctttcttcctgaaactgcgggatcaccgcattcagccatgtctgaaactggctctcttccggtaacccggaattatcttcacatgccagttgtaaatcgaggatcacctgactcatttttgttcctgttcttcgcgcttgcgttctgctgccagcgccgcttttcgtttttgttcggcttcttcccaggcttcataggcgttaacgatacgcgccaccacagggtgacgaaccacgtcttcgctgtggaagaagttaaagctgatctcttcgacatcggccagcacttcgatggcgtgacgtaagccacttttagtattacgcggcaggtcgatctgtgtgacgtcgccggtgataaccgctttactgttaaaaccgatacgggtcaggaacatcttcatctgttcgatggtggtgttctggctctcatcgagaatgataaacgcgtcgttcagcgtacgaccacgcatataggccagcggtgcgacttcaataacgttgcgctcaatcagtttctcgactttctcaaagcccagcatttcaaacagcgcgtcgtacagcgggcgcagatacgggtctactttctggcttaaatcgccaggcaggaagcccagtttctcaccggcttctactgccggacgagtcagcagaatacggcgaatttcctgacgctccagggcatcaactgccgcagccactgccaggtaggttttacccgtacccgccgggccaacgccgaaggtaatgtcatggtcgagaatattggcgatgtactgcgcctggtttggcgtgcgcggcttaattacgccgcgtttggttttgatattgaccgctttgccgtactccggcacgctctccgcgctttgctccagtacccgcgcttctttaatcgcaaggtggatctgttccggttcgatatcctgaatctgaccgcgcatcggggcagtatcgacatacaggctacgcagaatgtctgccgcagcggtgacgcaaatcggacggccggtcagtttaaagtggttatcgcggcgattgatctcgatgccgagacggcgttcgagctgcttgatgttgtcatcaaacgggccgcacaggctcaacagacgcgcattgtctgctggctccagggtgatttcgcgagtgtctatgttcaaaccgttcctcttatctgtatgccgccggaagctgaacattcaccggcctataaggaaattattcacgccacaggaaaaaggcgcaagcattgcaataaagatggggataaagagagaaaaaacaaggcccaccggaacggcaggcctgagaattacggctgataataacccacgccaaggtcgttttctttgcgggtacgggcaatcacactttccggtgtttctgccacgcgcagacccatttcatcttcagtacgcaccactttaccgcgcagagagttcgggtagacgtcggtaatttctacatcgacgaatttaccgatcatatccggcgtgccttcgaagttgaccacgcggttattttccgtacgcccggaaagctccatgatgctcttacggcttgtaccttctaccagaatacgctgggtggtgccgagcatccggcggctccacgccatcgcttgctgattaatgcgctcttgcagaatatacagacgctgcttcttctcttcttccggaacatcatcaaccatatcggcggctggtgtacccggacgtgcagagaagataaagctgtagctcatgtcgaaattgacgtcggcaatcagcttcatcgttttctcgaagtcttcggtggtttcgccagggaagccaacgatgaaatcagaactgatctgaatatctggacgcgccgcacgcagtttacggatgatcgctttgtactccagcgccgtatgggtacggcccatcaggttcagaatgcgatcggaaccgctctgtaccggcagatgcaggaagctcaccagctccggcgtgtcgcgatacacttcgatgatatcgtcggtgaattcgatcggatggctggtggtaaagcgaatacgatcgatcccgtcgatcgcagcaaccagacgcagcagatcggcaaagcttccggtggtgccgtcgtagttttcaccacgccaggcgttcacgttctgaccgagcaggttgacttcacgcacgccctgagccgcaagctgggcaatctcaaacagaatatcgtcggacggacggcttacctcttcaccacgggtgtaaggcaccacgcagtaggtgcaatatttattgcagccttccatgatggagacaaacgcggtcggcccttcggcgcgcggttccggtagacggtcaaacttctcgatttccgggaagctgatatctacaaccgggctgcggtcgccacgcacggagttgatcatctccggcagacggtgcagcgtttgcggcccaaaaataatatcgacatagtgggcgcgctggcgaatgtgctcgccttcttggcttgccacgcagccaccgacgccgataatcaggtctggattcttctcttttaacagtttccagcgacccaactgatggaagactttttcctgagccttctcgcggatactgcaggtgttcagcagcagcacatccgcttcttccgccacgtcggtcagttgatagccgtgggtggcatccagcagatcggccatcttgctactatcgtactcgttcatctgacagccccaggttttaatatggagttttttggtcatcgacttgctcttgcgaaatagtagccaggaatgcagggcgcatagtgtaatgctttgctgccgttgtgaccagtatgagcgttatcagcccttaggggtaaaaatcctgtaaacttaaagcatattgctaacaggatgattgaccatgacaaatcaaccaacggaaattgccattgtcggcggaggaatggtcggcggcgcactggcgctggggctggcacagcacggatttgcggtaacggtgatcgagcacgcagaaccagcgccgtttgtcgctgatagccaaccggacgtgcggatcagcgcgatcagcgcggctagcgtaagtttgcttaaagggttaggggtctgggatgcagtacaggctatgcgttgccatccttaccgcagactggaaacgtgggagtgggaaacggcgcatgtggtgtttgacgccgctgaacttaagctaccgctgcttggctatatggtggaaaacactgtcctgcaacaggcgttgtggcaggcgctggaagcgcatccgaaagtaacgttacgtgtgccaggcagcctgattgcgctgcatcgccatgatgatcttcaggagctggagctgaaaggcggtgaagtgattcgcgcgaagctggtgattggtgccgacggcgcaaatagccaggtgcggcagatggcgggaattggcgttcatgcatggcagtatgcgcagagctgcatgttgattagcgtccagtgcgagaacgatcccggcgacagcacctggcagcaatttactccggacggaccgcgtgcgtttctgccgttgtttgataactgggcaagcctggtgtggtatgactctccggcgcgtattcgccagttgcagaatatgaatatggcacagctccaggcggaaatcgcgaagcatttcccgagccgtctgggttacgttacaccgcttgccgctggtgcgtttccgctgacgcgtcgccatgcgttgcagtacgtgcagccagggcttgcgctggtgggcgatgccgcgcataccatccatccgctggcggggcagggagtgaatcttggttatcgtgatgtcgatgccctgattgatgttctggtcaacgcccgcagctacggcgaagcgtgggccagttatcctgtcctcaagcgttaccagatgcggcgcatggcggataacttcattatgcaaagcggtatggatctgttttatgccggattcagcaataatctgccaccactgcgttttatgcgtaatctcgggttaatggcggcggagcgtgctggcgtgttgaaacgtcaggcgctgaaatatgcgttagggttgtaaccttacaacattgccggatgcgtgccaaccgtaggtcggataagacgcggcagcgtcgcatccgacattgaaggataagacgtgtcaacatcgcattcgacattgaatgaacgcagaaaagcaaaaagctcgccgaagcgagcttttttaatgtggctggggtacgaggattcgaacctcggaatgccggaatcagaatccggtgccttaccgcttggcgataccccaactgggtgcacttacaaggtaagcgtcttgaataaattggctggggtacgaggattcgaacctcggaatgccggaatcagaatccggtgccttaccgcttggcgataccccaacaaattggttttgaatttgccgaacatattcgatacattcagaatttggtggctacgacgggattcgaacctgtgaccccatcattatgagtgatgtgctctaaccaactgagctacgtagccagattgtttcttcgatggctggggtacctggattcgaaccagggaatgccggtatcaaaaaccggtgccttaccgcttggcgataccccaataaccgggcggtgaaccgcttactcgaagaagatggctggggtacctggattcgaaccagggaatgccggtatcaaaaaccggtgccttaccgcttggcgataccccatccgtacaacgctttctggtgaatggtgcgggaggcgagacttgaactcgcacaccttgcggcgccagaacctaaatctggtgcgtctaccaatttcgccactcccgcaaaaaaagatggtggctacgacgggattcgaacctgtgaccccatcattatgagtgatgtgctctaaccaactgagctacgtagccatcttttttttcgcgataccttatcggcgttgcggggcgcattatgcgtatagagccttgcagcgtcaacctctttttcaaggaaaattgctcgaaagtgactgtttggttaggttgcgaacagcgtggcgctatattcgtcaattattgtttactttgtgttttttcccaccctacagccattcttttgtcatacaggatgaaattcggaatttaacaatagtggtgggaaattaatctatgaaatactggcctacagtgatgagttgtcaaacagtgatgtggcaaacccggaacatttccttactgcatatcagaatcaacaagcacctcaataactgaaacagccccggatttcaccggggctgtttcgcatttcttacttatacgcgctctggtgaacaccaaccgcgcgaccagacggatcgtccattttcttgaacgcttcatcccattcgatcgctttagcggaagaacaagcgacggaaggaccgcccggcacgcactcagcggcgctcggaagcgggaatagttcttcaaagatctcccgatacaagtacgcttctttagaggttggcgtgttgtacgggaagcggaagcgggcagtttccagttgctgatcagaaacctgctgcgcagccacttctttcagggtgtcgatccaactgtaaccgacgccatcggagaactgctctttctgccgccaggccacgcttgcaggcagatacgcttcaaaacattcacgcaggatgtgtttttccattttgccgttaccgcacattttatcctgtgggttaatacgcatcgccacatcaaggaattttttgtcgaggaacggaacgcgtgcttccacgccccaggcactcatcgctttgttggcacgcgcgcagtcatacatatgcagggccagcagtttacgcaccgtctcttcatgcagttctttggcattcggtgctttgtggaagtaaagataaccgccgaacacttcatcagaaccttcaccggacagcaccattttaatgcccatcgccttgatcttacggctcattaaatacatcggtgtactagcgcgaatagtggtcacatcataagtttcgatgtggtaaatcacgtcgcggatggcatccagaccttcctgtacagtgaagtgaatttcgtgatgcaccgtgcccagatggtttgccacttcctgggctgctttcagatccggactacccggcagacctacagcaaaggagtgtaactgcggccaccaggcttcagagcgttcctgatcttccacgcgacgggctgcgtatttcttggtgatagcggaaataatactggaatccagaccaccagaaagcagcacaccgtaaggcacatcagacatcagatggcttttaacactatcttccagtgcctgacgcagctcgtttttgtcggtcacgttatctttcaccgcatcgtagtcgaaccagtcgcgatgatagtaagaacggatttcgccgtcctggctccacaaatagctccccgccgggaactctttaatcgtgcggcaaactggcaccagcgctttcatttcactggccacatacagctgaccgtgttcgtcataccccatatacagtgggatgatccccagatggtcgcgaccaatcaggtaggcatctttttcgctgtcgtacagtgcaaaggcaaacatgccctgcaagtcgtcgagaaattccggccctttttcctgatacagcgcgaggatcacttcacagtcagacccggtctggaactggtaacgatcgccatattcggcgcgcaatgcctggtggttgtagatttcaccgtttaccgccagtacgtgggttttttgttggttgtagagaggttgcgcccccgcgttaacgtcaacaatactcagacgttcgtgggcgagaatggcgttatcgctggcataaataccggaccagtccgggccacgatgacgcatcaggcgactcagctcgagggctttcttacgcagctcaactgcgtctgttttgatatcgaatacgccaaaaatactacacataaccttctccgttaacctggtatttgttgcttgttgtgtttgcttgtttaaaaaaatgccgcaaagcagcactgtgcgcaagcgatttggcggtgaaaaaataaaaaacgtaatggtgattgtcgattggtgaaaaaaggtctggtgtgaggatatatttattgatgaatcgataatttttagcgggttttattgaatgtttatattttacgggggccaaattgctgacaaagtgcgatttgttcatgccggatgcggcgtgaacgccttatccggcctacaaaagcatgaaaattcaatatattgcaggagctgcgtaggcctgataagcgtagcgcatcaggcagtttggcgtttgtcatcagagccaaccacgtccgcagacgtggttgctattcagataacgtcgatttcagcgacactcgggtaaatccagctggggcggaaaggcatactgtcgatatcgtcgaggctgctaacaccagaaagcaccagaatcgtctccagacctgcctggaagccggccagaatatcggtacgcaggttatcgccgacaatcaccgtttcttcgctatgcgcctgcattttgtttaatgctgcgcggatgatccacgggctgggcttaccaacatagaacggtttgcgcccggagattttctcaatccctgcacacaacgcgccacaagcgggataaaaaccgcgcccgtgggtgtccggattggtggcgataaaacgtgcaccgttagcgacgaaataggctgctttatgcatcatgtcccagttgtaggaacgcgtttcgccaacaatcacgaaatcagggttcacatcggtaatagtgaaaccggctttgtacagttcatgaatcagtgcgccttcgcccaccacatacgctttcttgccttcctggcgacgcaggaaatcggcagtcgccatcgcagaggtataaaacacgctgtcaggtacatcgacacctgcggtggcaaagcggttcgccagatcttgcccagtctggctaggatagttggtcagcaacaccagcggcaggcctttatccataatcccgtgcaaaaattccgctgcacccggtacggcgacgttatcgtgcatcagcacgccgtcgatatcgcaaattacatttttaatggtcatggactacccagaatattgacaacaataagcgccactataaaagcacattaattttccagcaaatgctggagcaaaataccgttgagcatggcgcgttttaccagcgcaaaagcgccgattgcgctgcggtgatccagctcagaacgtaccaccggcagattagtgcgaaacgccttcagcgcctgggtattaatgcagctttcaatagcagggagcagcactttatcggcttcggtgatttcaccggcaataacaattttttgcggattaaataagttgatagcaatggcgatggttttacccagatgacgaccgacatactcaattacttcgctcgccagactatcgcctttgttcgcggctttgcagatagttttgatggtgcagtcgtccagcggcacgcggctctggtagccctgctttaacagattcaacacccgttgttcaatggcagcgttggcagcgatagtttccaggcagccaaagttgccgcagtggcagcgttcacccagcggttcgacctgaatatggccaatttcaccgacgttgccgttgcggccaataaaaatgcgcccgttagagataatcccggccccggttccgcgatggacacgcaccagaatggagtcttcgcaatcctgacttgcaccgaagtagtgctccgccagcgccagactacggatatcgtgaccaacgaaacaggtcactttaaaacgttcttccagagcttctaccagcccccagttttctacctgaatatgcggcatgtaatgaattttgccgctgtccgggtcaacaagccctggcaggatcacgctaatcgcgatcagctcgcgcagtttgcgctggtagctatcaataaactgagcaatggcattcaacagggcatgttccagcgtttgctgggtacgttccggcagcgggtaatgttcttctgccagcactttgctgctgagatcaaacagagtgatggtggcgtcatgacgaccaagccgtacgccgattgcgtggaaattgcgggtttcggtgacgatggagatagcgcggcggcccccggtggaggcctgctgatcaacttctttgatcagcccgcgttcgataagctgacgcgtaattttggttacgctggcgggggcaagctggctttgctcggcaatctgaatccggctgattggcccgtactggtcaatcaggcgataaaccgccgcgctgttaagctgttttacgagatcaacattacctatctgagcttgtccgcctggtgtcatactttctcttattgagttacgacctcgttaccgttaacgatggtcttggtgattttaaaatcaggtgtgaatgcagtcaggttggctactttacctgcggcgagtgtgccgagacgtttctcaacgccaatcgcacgcgccggatagagcgtcgccatacgtagcacttcatccagtgcgataccgcaatgttcgaccagattacgcacgccttcaatcatggttaaggaactaccgcttaacgtaccgttctcatccacacaaagtccgttacggtagtatattgttttacccgcaaaaatgaactgttcaatgttggcacctgctggcgcggtggcgtcagtaaccagacacagtttgtcgcctttcagacgtttagcgttgcgaatgttggcgtaatcaacatgcaggccatcagcaataataccgcaataaatgtcagcttcgtcgaggatcgcgcccgccaggccaggttcacgaccggtaatatacggcatcgcgttgtacagatgggtggcaaaggtaatccccgcgcggaaaccggcttttgcttctttcaacgtcgcgttggagtgaccggcagaaaccacaatcccggcatttgccagtttgctgatgacttccgcaggaaccatttccggtgccagggtcactttggtaatgacgtcggcgttttcacacaggaaatcgaccagcgcggcatcaggcttacgcacaaaattcggattatgggtgcctttttttaccagattcagccacggaccttccagatgcagacctaacgcctgattcggatgttttgccaggtactcgcgcataacgcgcacgccctgtttcatcagctcatcgctggtggtgataagcgtcggcagatagttagtacagccacttttctcattggctttctgcatgatttccagcgtttccacgctgaccgcttcagcggtgtcgttaaactgtacgccgccgcagccgtttaactgcacatcgataaaaccgggggagagaatggccccgttcagactacgttgttcgatctctggcggcagttccgctaccggacagacgcttttaatcaggccatcagcgataacaaccgcgtggtcatcaagaaattcgtggccggtaaagatccggccctgggttaatgcatacattctgacccccgattttaaaaaatattgccctgagcaaggagccagggcagggataacaattacagacctttgatattttctgcttctaattcattgaaatatcttaaagtcttaactttcagctccatggtggaaggttcatcgcacaccatgatcgctttcggatgcagttgcagacagctgatggtccacatatggttcacgcaaccttcaacggcggcctgcagcgccagtgctttctggctacccagcaccagaatcatcacttcttcggcatccagcagtgtaccaacaccgacagtcagggcatattttggcacctgattaacatcgttatcaaagaaacgagagtttgcgacgcgagtgtcatgagtcagggttttgatacgagtacgagaagccagagaagacgccggttcgttaaatgcaatatgaccgtcgttacctacaccgcccataaacagatgaatttttccgtaagaacggattttttcttcatactggcggcactcggcgtcgatatccggggcgttgccgttgagaaggttgatgttttctgctggaatatcaacgtgatcgaagaaattacggtgcataaagctgtagtagctttccggatgctctttcggcagaccgacatattcgtccatgttgaaggtgacaacgtgcttaaagctgacctggcctgctttatgcatttcgactaacgctttataggtggtcatcggcgtgccgccagtcggcaggcccagtacaaacggacgatcggcagtcggtttgaacgcattgatacgattgacgatatggcgagcagcccatttgccgacctgttcagcggtagtcagggggatcagtctcattattcacctcaataagtaaaatgtaagccgttggcggattaggcatctttaagcgtaacctggatttgcgcagacaggcgtcaatccgacctgattttttgaatgataaaataagttttctggtttagccagtaaaagggagtgataataacgatatttggtgacaaaactcacaaaagacacgcgtttaatttgcgatacgaattaaattttcacacactctgtagcagatgatctaacaatctgattacagaacatcggcagtacaatttgcagcaaaataaaaatacggcttgaaacgagccaaatagggttctcgtagggggaataagatgaatattttaggttttttccagcgactcggtagggcgttacagctccctatcgcggtgctgccggtggcggcactgttgctgcgattcggtcagccagatttacttaacgttgcgtttattgcccaggcgggcggtgcgatttttgataacctcgcattaatcttcgccatcggtgtggcatccagctggagcaaagacagcgctggtgcggcggcgctggcgggtgcggtaggttactttgtgttaaccaaagcgatggtgaccatcaacccagaaattaacatgggtgtactggcgggtatcattaccggtctggttggtggcgcagcctataaccgttggtccgatattaaactgccggacttcctgagcttcttcggcggcaaacgctttgtgccgattgccaccggattcttctgcctggtgctggcggccatttttggttacgtctggccgccggtacagcacgctatccatgcaggcggcgagtggatcgtttctgcgggcgcgctgggttccggtatctttggtttcatcaaccgtctgctgatcccaaccggtctgcatcaggtactgaacaccatcgcctggttccagattggtgaattcaccaacgcggcgggtacggttttccacggtgacattaaccgcttctatgccggtgacggcaccgcggggatgttcatgtccggcttcttcccgatcatgatgttcggtctgccgggtgcggcgctggcgatgtacttcgcagcaccgaaagagcgtcgtccgatggttggcggtatgctgctttctgttgctgttactgcgttcctgaccggtgtgactgagccgctggaattcctgttcatgttccttgctccgctgctgtacctcctgcacgcactgctgaccggtatcagcctgtttgtggcaacgctgctgggtatccacgcgggcttctctttctctgcgggggctatcgactacgcgttgatgtataacctgccggccgccagccagaacgtctggatgctgctggtgatgggcgttatcttcttcgctatctacttcgtggtgttcagtttggttatccgcatgttcaacctgaaaacgccgggtcgtgaagataaagaagacgagatcgttactgaagaagccaacagcaacactgaagaaggtctgactcaactggcaaccaactatattgctgcggttggcggcactgacaacctgaaagcgattgacgcctgtatcacccgtctgcgccttacagtggctgactctgcccgcgttaacgatacgatgtgtaaacgtctgggtgcttctggggtagtgaaactgaacaaacagactattcaggtgattgttggcgcgaaagcagaatccatcggcgatgcgatgaagaaagtcgttgcccgtggtccggtagccgctgcgagtgctgaagcaactccggcaactgccgcgcctgtagcaaaaccgcaggctgtaccaaacgcggtatctatcgcggagctggtaagcccgattaccggtgatgtcgtggcactggatcaggttcctgacgaagcattcgccagcaaagcggtgggtgacggtgtggcggtgaaaccgacagataaaatcgtcgtaagtccagccgcagggacaatcgtgaaaatcttcaacaccaaccacgcgttctgcctggaaaccgaaaaaggcgcggagatcgtcgtccatatgggtatcgacaccgtagcgctggaaggtaaaggctttaaacgtctggtggaagagggtgcgcaggtaagcgcagggcaaccgattctggaaatggatctggattacctgaacgctaacgcccgcagcatgattagcccggtggtttgcagcaatatcgacgatttcagtggcttgatcattaaagctcagggccatattgtggcgggtcaaacaccgctgtatgaaatcaaaaagtaatctgctttatgcctgatgcgacgcttgagcgtcgcatccaacaatgacaagcggtggagatcttctctgccgctttttttttcatcaatcatccccataatccttgttagattatcaattttaaaaaactaacagttgtcagcctgtcccgcttataagatcatacgccgttatacgttgtttacgctttgaggaatccacgatgagtgaggcagaagcccgcccgactaactttatccgtcagatcatcgatgaagatctggccagtggtaagcacaccacagtacacacccgtttcccgccggagccgaatggctatctgcatattggccatgcgaaatctatctgcctgaacttcgggatcgcccaggactataaaggccagtgcaacctgcgtttcgacgacactaacccggtaaaagaagatatcgagtatgttgagagcatcaaaaacgacgtagagtggttaggttttcactggtctggtaacgtccgttactcctccgattattttgatcagctccacgcctatgcgatcgaactgatcaataaaggcctggcgtacgttgatgaactgacgccggaacagatccgcgaataccgcggcaccctgacgcaaccgggtaaaaacagcccgtaccgcgaccgcagcgttgaagagaacctggcgctgttcgaaaaaatgcgtgccggtggttttgaagaaggtaaagcctgcctgcgtgcgaaaatcgacatggctagtccgtttatcgtgatgcgcgatccggtgctgtaccgtattaaatttgctgaacaccaccagactggcaacaagtggtgcatctacccgatgtacgacttcacccactgcatcagcgatgccctggaaggtattacgcactctctgtgtacgcttgagttccaggacaaccgtcgtctgtacgactgggtactggacaacatcacgattcctgttcacccgcgccagtatgagttcagccgcctgaatctggaatacaccgtgatgtccaagcgtaagttgaacctgctggtgaccgacaagcacgttgaaggctgggatgacccgcgtatgccgaccatttccggtctgcgtcgtcgtggttacactgcggcttctattcgtgagttctgcaaacgcatcggcgtgaccaagcaggacaacaccattgagatggcgagcctggaatcctgcatccgtgaagatctcaacgaaaatgcgccgcgcgcaatggcggttatcgatccggtgaaactggttatcgaaaactatcagggcgaaggcgaaatggttaccatgccgaaccatccgaacaaaccggaaatgggcagccgtcaggtgccgtttagcggtgagatttggattgatcgcgccgatttccgcgaagaagctaacaagcagtacaaacgtctggtgctgggtaaagaagtgcgtctgcgtaatgcttatgtgattaaggcagaacgcgtcgagaaagatgccgaaggtaatatcaccaccatcttctgtacttatgacgccgataccttaagcaaagatccggcagatggtcgtaaagtcaaaggtgttattcactgggtgagcgcggcacatgcgctgccggttgaaatccgtttgtatgaccgtctgttcagcgtgcctaacccaggtgctgcggatgatttcctgagcgtgattaacccggaaagcctggtgatcaaacagggctttgctgaaccgagcctgaaagatgcggttgcgggtaaagcattccagtttgagcgtgaaggttacttctgcctcgatagccgccattctacggcggaaaaaccggtatttaaccgcaccgttgggctgcgtgatacctgggcgaaagtaggcgagtaattttaagtttcgctatgccggatggggcgtttacgtcgcatccggcaaggaacagacaaacagtttcaaacgctaaattgcctgatgcgctacgcttatcaggcctacatgatctctgcaatatattgagtttgcgtgcttttgtaggccggataaggcgttcacgccgcatccggcaagaaacagcaaacaatccaaaacgccgcgttcagcggcgttttttctgcttttcttcgcgaattaattccgcttcgcaatttatccataaaataaatttaaaataacaaaacataattaaataaaatgtaaccgctttcatcttgctggaatttcacgcttttattcttctgcaagcctttcaaccgcaaacttaagccttgtaacaaaaatcatcaaaatatgtgcggttgctcatgttcttacattctggttacagaaagagattgataattcgcgtcgcgaaaaatagtctgttcctgtagtcagcgagacttttctcaacgctacttttttaatttttattttttcgctgttcacctttggtgcagcaatttatacgtcaaagaggattaacccatgcgtacgtttagtggcaaacgtagtacgctggcgctggctatcgccggtgttacagcaatgagcggctttatggcaatgccggaggctcgcgccgaaggattcatcgacgatagtaccttaaccggcggtatctattactggcagcgtgaacgcgaccgtaaagatgttaccgacggcgacaaatacaaaaccaacctttctcactccacctggaatgccaacctcgattttcagtccggttatgctgctgatatgttcggccttgatattgctgcgtttacggcgattgaaatggcggaaaacggcgacagctcccacccgaacgaaatcgcgtttagtaaaagtaataaagcctatgacgaagactggtccggcgacaaaagcggtataagcctgtataaagctgcggccaaatttaaatacggtccggtttgggcgagggcaggttacattcagccaactggtcaaacgctgttagcgccgcactggagctttatgccaggtacttatcagggggcggaagccggggcgaattttgattacggcgatgctggtgcgttgagtttctcctacatgtggaccaacgaatacaaagcgccgtggcatctggaaatggatgagttttatcagaacgataaaaccaccaaagttgattatctgcactcctttggggcgaaatacgacttcaaaaataacttcgtactggaagcggcatttggtcaggcggaagggtatatcgatcaatattttgccaaagccagctacaaatttgatatcgccggtagcccgttaaccaccagctaccagttctacggtacccgagataaagttgacgatcgcagcgtcaacgacctttatgacggcaccgcctggctgcaagcgttgacctttggttaccgggcggctgacgtagtggatttgcgcctcgaaggcacctgggttaaggctgacggtcagcagggatacttcctgcaacgtatgactccaacctacgcttccagtaacggtcgcctggatatctggtgggataaccgttctgacttcaacgccaacggcgaaaaagcggtcttcttcggtgcgatgtatgacctgaaaaactggaatcttccaggcttcgccatcggcgcttcctacgtttacgcatgggatgctaaacctgcgacctggcagagcaatccggatgcgtactacgacaaaaaccggactattgaagagtctgcctacagcctggatgcggtctataccattcaggacggtcgcgccaaaggcacgatgttcaaactgcatttcaccgaatacgacaaccactccgacatcccaagctggggcggtggttacggcaacatcttccaggatgagcgtgacgtgaaatttatggtaatcgcaccattcaccatcttctgatgcccgacgcggcaggttttgtgcctgccgcacgtttgaggaatttgctatgaaaaaactgattctcatcgccataatggcaagcgggctggtagcttgtgcgcaaagtaccgcgccacaggaagacagtcgtctgaaagaggcatacagcgcctgtatcaacaccgcacaaggtagcccagaaaaaattgaagcctgccagagcgtgttaaacgtgctgaagaaagagaaacaacatcagcagtttgccgaccaggaaagtgtacgcgtactggattatcagcagtgtctgcgtgcaacgcaaaccggaaatgatcaggcggtgaaagccgattgtgataaagtctggcaggaaatacgcagtaataacaaataagtgagagctgtaactctcgcttttcttatttcccttgcataaaaaagccaacccgcaggttggcttttctcgttcaggctggcttatttgccttcgtgcgcatgttcatcttcgcggcaatcgccttcggcacagtgaccgtaaagatagagactgtggttagtcaggcgaatgccatgttttgcggcaatttcacgctgacgcgcttcgatggaatcatcactaaattcgataaccttgccgcagtcgaggcagatcaggtgatcgtggtgatgttgctgtgtcagttcaaatacggatttaccgccttcaaaattgtggcgggtgacgataccagcgtcgtcaaactggttcagtacgcgatataccgtagccagaccaatttcttcacccatatcgatcagacgtttgtataaatcttccgcactgacgtgatggttgtccggctcctgaagaacttccaggatttttaaacgaggaagcgttactttcaggccagctttctttagggcggtattgttatcagtcatgcggaatctgtcctgttactaagcggttcacttcattagaagaagtgacagaatttgctcttgagataatgcgtatcattatagaattgccacgcctaaatgaaaaccacaagtccctggcaaatattgttaataaaaacgtggcacagcttacatttacaacggcaaggccacttgaacaccgggacattgtacaggtacaacagcaaaagttacaaatttgtagcaattattttgattggcattatctattaatacggcgtagacatgagtctacgccgcatcacatcaggcattgagaatttcgtcgagatgcaactcttcagaaatctgtttaacccatttttctacacgttcagcggtcagttccggctgacggtcttcgtcgatagccagaccgacaaagtggtcgtcatctgccagacctttacttgcttcgaaatgatagcccgcagttggccagtgaccaacgatggttgcaccgcgcggttcaatgatgtcgcggatggtgcccaatgcgtcgcagaaatattcggcgtaatcttcctggtcaccacaaccaaacagcgcaaccagtttgccgttgaaatcaatctcttcgagagtcgggaagaagtcatcccagtcacactgcgcttcgccgtaataccaggttgggatgcccagcagcagaatgtcataagcttccagatcttctttgctgctttttgcaatgtcatggacatcggcaacgtctttaccaagctgtttttgaatcatttttgcgatattttcggtattaccggtgtcgctgccgaaaaagatgccagtgatagccatgagtgaaataacctcttgaaacttattgaaatgggggtggaaaattgcccacggataaaggcaatcatagcagaacaggcagtcttgcggaatcagcaaacgagcaggactgcacactgtgctacatgaaagtggaaatttaaacgatgccctgactacgcagcgccgccagttgctgcattaacatctcttcgatcagttcgctacggctcatattgcggctctccgccagctcgttcagcgcctcgacagcttccgcgttcagcttcagttcgacacgcttaaggccacgtactttgtcgcgttttagctggttgcgtttattaatacgcagctgttcatcgcggctaagcggattagttttcggtcgtcccggtcgacgctcgtgcgcgaacagatctaatgtcgtacggtccgtttgttctttggccatgatcttggtgacttcgggggaaacaatcagccaggcctctgcccggatggatagcgcgccataatacatcagcgcgatgagtcacgccaacgcccacgcgcggaaagcgacgcggacgctgggtttttaatcagttgcgttaatcattgagatagcgacggatagcgcgtaataccgcatccggtttttcagcatggacccagtgacccgcgcctgcaatcacatgcgcccgtgcctgtggaaattgagccagtaaatcatcacggtactgctcgctaacatacggagaattgccgccagggataaacagggcagggtgatcccatgccgggattttctcccaacctacaatatgcggatactgatcccacaataccggcacgttaaagcgccactccccgtcaacaaaagatttcagcagaaactgaatcaccccttcttcattaagatgctggcgcattattgctgctgcttgctggcgagtttgtgcgtcgctttcactgaccgcgttgatagccgcaaaaatctcatcatgacggcgtacgtgatagtcgaccggcgcgatatcgatcgccaccagtttatcgatgcgatcggaggctagtgcagtaagtgccattaccgctttaccgcccatggagtgaccgataaatgttgctttgtcgatctgctgtgcatccagagtatcaacaagatcctgcgccatcgccgggtaattcattaccggatctctcggactaagaccgtggttacgcatatcaacctggatgatattgtgatcgtttaccagatcgcgagccagtacgccaaggttgtcgaggctgccaaacagaccgtggacaagaacgatgggagaattattgtgctggttttgtgcagtttgcgcgcggatattcaatttcatggcaaagttctttttttcgcgttgtcgggttagggtattatgttgaccattgtgccacagggctgcaacaaataaggtttattccgagtttttctgcaagccaggcttgacgctatccgctgccgggatttattcatatactcctggcgacttgtattcagctaagacactgcactggattaagatgaaaacgattgaagttgatgatgaactctacagctatattgccagccacactaagcatatcggcgagagcgcatccgacattttacggcgtatgttgaaattttccgccgcaagtcagcctgctgctccggtgacgaaagaggttcgcgttgcgagtcctgctatcgtcgaagcgaagccggtcaaaacgattaaagacaaggttcgcgcaatgcgtgaacttctgcttagcgatgaatacgcagagcaaaagcgagcggtcaatcgctttatgctgctgttgtctacactatattctcttgacgcccaggcgtttgccgaagcaacggaaagcttgcacggtcgtacacgcgtttactttgcggcagatgaacaaacgctgctgaaaaatggtaatcagaccaagccgaaacatgtgccaggcacgccgtattgggtgatcaccaacaccaacaccggccgtaaatgcagcatgatcgaacacatcatgcagagcatgcaattcccggcggaattgattgagaaggtttgcggaactatctaaaacgttgcagacaaaggacaaagcaatggcaatccacaatcgtgcaggccaacctgcacaacagagtgatttgattaacgtcgcccaactgacggcgcaatattatgtactgaaaccagaagcagggaatgcggagcacgcggtgaaattcggtacttccggtcaccgtggcagtgcagcgcgccacagctttaacgagccgcacattctggcgatcgctcaggcaattgctgaagaacgtgcgaaaaacggcatcactggcccttgctatgtgggtaaagatactcacgccctgtccgaacctgcattcatttccgttctggaagtgctggcagcgaacggcgttgatgtcattgtgcaggaaaacaatggcttcaccccgacgcctgccgtttccaatgccatcctggttcacaataaaaaaggtggcccgctggcagacggtatcgtgattacaccgtcccataacccgccggaagatggtggaatcaaatacaatccgccaaatggtggcccggctgataccaacgtcactaaagtggtggaagacagggccaacgcactgctggccgatggcctgaaaggcgtgaagcgtatctccctcgacgaagcgatggcatccggtcatgtgaaagagcaggatctggtgcagccgttcgtggaaggtctggccgatatcgttgatatggccgcgattcagaaagcgggcctgacgctgggcgttgatccgctgggcggttccggtatcgaatactggaagcgtattggcgagtattacaacctcaacctgactatcgttaacgatcaggtcgatcaaaccttccgctttatgcaccttgataaagacggcgcgatccgtatggactgctcctccgagtgtgcgatggcgggcctgctggcactgcgtgataagttcgatctggcgtttgctaacgacccggattatgaccgtcacggtatcgtcactccggcaggtttgatgaatccgaaccactacctggcggtggcaatcaattacctgttccagcatcgtccgcagtggggcaaagatgttgccgtcggtaaaacgctggttagttctgcgatgatcgaccgtgtggtcaacgacttgggccgtaaactggtagaagtcccggtaggtttcaaatggtttgtcgatggtctgttcgacggcagcttcggctttggcggcgaagagagtgcaggggcttccttcctgcgtttcgacggcacgccgtggtccaccgacaaagacggcatcatcatgtgtctgctggcggcggaaatcaccgctgtcaccggtaagaacccgcaggaacactacaacgaactggcaaaacgctttggtgcgccgagctacaaccgtttgcaggcagctgcgacttccgcacaaaaagcggcgctgtctaagctgtctccggaaatggtgagcgccagcaccctggcaggtgacccgatcaccgcgcgcctgactgctgctccgggcaacggtgcttctattggcggtctgaaagtgatgactgacaacggctggttcgccgcgcgtccgagtggcacggaagacgcatataagatctactgcgaaagcttcctcggtgaagaacatcgcaagcagattgagaaagaagcggttgagattgttagcgaagttctgaaaaacgcgtaaacacatttaataaaaaaagggcggtcgcaagatcgcccttttttacgtatgacaaacacagaattgcctgatgcgctacgcttatcaggcctacgaggatggtgcaatatattgaatttaagcgattttgtaggccggataaggcgttcacgccgcatccggcaaaaacaacgaacactttgtcaacaaactgagtagctcaaggaaatcccaatgaagaccaacaggagtctggtcgtcatagtgagtctaattaccgccacattactgctgactgcatgcgcccaacctgaacaaagtagtttagctggcgactggttactgacccctaaagataaaaccagaggattaacgggtagcattgcggtaaatattgcacctttccggtgtaagacaaattgccgtggtgataacttacctgataatacccgccgctggcagttgagtggcgggaacgaaaaagaacttacttatcttcataatatgagtgcacaagaaaaggtcggtttaaatcccggttggcaatgctacaccagtttttttatgcgggtttgccagggcaagcccggcactcgaccgatagtcaatgaggattatgtcagcgaaagcggattttttggcagcatgatgcatgtcgggattattgagttacgacgctgccagagtgaaaattgccagcaagaattgaaagcgataaatacacattaaaatagtgagtccgggaatgaaacccggacctgaacatgtcttattgcgtgaatgtttctttcatttgatactgcatttcccagagttcagtaaggctaataacttttcttgttcttgcttcttcactttgtacccataagaaagggtagaacgtgaaggcttccgttgcgcttaattttattacgtcttctcgccattgctgccatcgtacattttcatagaaggtatctaaatcaccggataatgcccactgaagaaactcagaatatccaacttccagactttcccaattcagcgtatctggcgcaaaataataaacgcagccagtatcttccccaagatcgccaccattaagagcaaaaattacccctgcgacatcgtcagcgatgggtaaagcccgcacgcctgcgaattcagggcgttgtgtccaacttactggatctcgtggcaaccgggggtgaccagatcctgctatgcgtaattaaccattatcaatcagcagacctccggagccatagacaagcgcacccatcggactttttgttgtcacctgtaattgataaagtgcggtttcggctaaatctttattaaccggtaagagttcggtatggtttgtggcgtcttttaaccagttctggattattggccaggcactatcttcagtatttactaactgattcatttcacgcatcgctacttgctccttgtgtgctacggtgtcatttatgatgaggaattgtatggaacattttttaaatattaagttccttatatttgaataaaaaatgactttatccatacattgccacttttttcaaagcataaaccgatacccaataccggtttcagtaataaaatggcgaggccgggccggatcctgttccagtttttgtcgcagatgccccatataattacgcaaatagttgctgtgttcgatcgcgtttagaccctacatctgccggatgcggcataaataacgaactatttgccaacaaacagaaagggcgatcattcaatcgcccttttttactttgttttattaaccgtgtttatttttcagttcaaagcgtggacttaccagaccatacagtgtccaaccaaggaaggtcacgatggaaccgtacagcatggcttcttccccggaactgtacagcgcataaaagctatacatcgcgccaacaaaagcaacaaagtttgcaactttcgctttactggggggcacattagcgaccttctgaataatgactaatgccgccatactcagaatatacggaatgatattggtcaccacggccaggttaaccagcacgttgaactgactgtttaggctcgggctaatggtcatcagtgccaatccactctgaataatcacaatggtcaacattccctgcaccggtgcatccactttggttacacgggagaaaattttagggaagtagccttcatcagaactagatttaaacacctgggcaatggtgaactgccagccaagtaggctaccgcagcaggacatcaccatcagcgccataatgactttacccacttccggcgtgaacatctgcgcgaaggccagaccaaatggtgccgtactatttgccagctccatatttggcacaatcccggcaatcacgttggtggagacgatataaatcaccgccgcacctaacgtaccgccgagtaccgcgattggcacattacgttccgggttttccactacatcagtattcgcacacgcagactccagaccaagaaaagcccacagcgtcatagcgatggaagaacctaccgcactgaagaacggtgcatgatgcggattccaggaatcaacgtacagcgtcgggctaaaccagaaccagccaataatgcacagaccgacgaccggaataatgaccccccacacggtaatgctactgatttgcccggtaatgcgcgcaccaccaaagttagccacggtacaaatccacagcaccccgatggtcgcaagaccaatctgcactgggctcaaactcgcgccgagcagttcggtgccgtaaccaaccgcgctaatagcaatcgcgacgttagcaatcagcagactgacgccgtaggtatagttcgccataaagttaccggatttaccgaaagcatactcggcataaccgcccataccgccacttttacggctgaacataccgcattttgcgaatgcccatgccagtgccatactgcctacggctgtcaccagccaggagataatactgattgtcccgacttcggcaagctttgtcggcagcatgatgataccggagcccatcatgttgaccatcgtcagtatggttaactgaacgacgcccattttgttgcttttagcctgactcataatttttcccctttcaacagggtgctttgcgcatcacgaggcttgatgacatagcaccaaacttgcttacgaccatcatgttcttcgatatagacaccctgcagctccggtgcaaaacctggcagcaggttgatcccttcttccagagcgctgaagtaacgcagaacagcaccaccccagatttcacccggaacaacacacagcacacccggaggataaggaagcgcaccttcggcagcgatacggccttctgcatccggcagacgaaccagttccacttcaccgcgtaaataggcgtagttggcttcttgcggattcatgctgacgcgtgggaagtgctccttacggaacatctctttttgcagttgtttcacgttgtggcgggcatacaaatcatgcatttcctgacacaactgacgcagggtataaccggcgtagcgctcttcatgctgtttgtagatggaaggtagcacttctgctaatggcgcgtcggactcaagcagtttttcgaagcgtaccagcagggcaacaagttgctgaagtttggccatatcttctgccggagtcagcaggaagaggatggagttaagatcgcatttttccggcactacgccattttcgcgcaggaagttagcaagaatcgtcgcgggtacaccgaacgcttcatattcgccgttacgtgcatcaatacctggggttgtcagcaacagtttgcatggatcgacaaagtattgattctctgcatagccttcaaaagaatgccagtgttcccctggtacaaactggaagaagcgcagatcaaccgcaatttgcgctgtttcatagctctgccagggtttaccatccaccagttcaggtacgaacggacgaatatgctgacagttatcgaggatcagtttgcgggcattaatgccatttaccacacaatccatccacatattacgaccgctgacaccttcatgcattttggcgttgatattcagtgcggcaaacagcggatagaacgggctggtggaggcgtgcatcataaaggcgttgttcatgcgtttgtgcggtacataacgctgttgccctttgatgtggctgtcttttttatgaatttgactagtctgagaaaaaccagcctgttgtttatgcacagattgcgtaaccagaatacccggatcgttctcattaagatccagcaacagcgggctacagtccgccatcatcggaataaactgttcatagccgacccatgcactgtcaaacaggatgtagtcacacagatgaccaattttatccaccacttggcgggcgttataaatcgtaccgtcgtaggtgcctaactgaatcacagcgaggcggaaaggacgagcctcttttgcccgctgcggtgcgacttccgcgatcagctcacgcaggtaactttcttcaaaacagtgcgcatcaatgccaccgataaagccatacgggttacgtgccgtttccagataaaccggtgttgcaccagcctgtagcaacgctccgtggtggttagatttgtggttattgcgatcaaacagcaccagatcacccggtgttagcagggcgtttaaaaccactttgttagaagaactagtgccatttaaaacgaagtaggttttatcggcattaaacacttttgccgcatgttgctgtgcaatgcatggcgcgccttcgtgaatcagcagatcgcccatcgctacgtcggcgttgcacaagtcggcacggaacagcgcctcaccaaagtattccacaaactgattccccgccggatggcgacggaaaaattcgccgccctgatgaccagggcaatcaaacgcgctgttaccttgattgacataatcgaccagtgcgcggaagaaaggtgggcgcagttgagtttcataatggctggcagcggtttctaactggcgaccataaaattctcgtcggctttcgcaattctcaaagacaccgctaatacggggcaaatactctgcgggtacacgttcttgattttcagtagcaataaataccgggatgccataacccgtggcatcgatttcatcgagttttccgcatgtaacatcgttgaggcttaaaactattgccgccacatcgatattacgactttcattaatgtagatacattctcgctgcgtggtaaaacagtccgggcaagaatcactaaccgcaatttttaatttactcatttttcatctctttattttaggtaatagcaggtcctcaatttctcgaatgagaaatcgatcgtgccggaaaaaagcaaagttaccccgctgataaataaatcaggtagattgcttttttcagaatgcagaaacccttaccagtcaggtggctgataatacaagggttaacagagaatgagcactgcggaatacaggcatatgcctgtaatacagagagtcaggaagacctgtacgctgaagtgcccttagtcggtagactaacgggcattgaagaagtgaaagtcgaagctattgcgatgagcaaacttcataatatgagttgtccgccttatatggggcatagtgcggctgttattttccatttaatttacctttcctgatgtgaatgaaggtgaagatattctatccaggaaatacggttgaactgtgaaggtgatcaataaaaaatgatcaatcttaatttatttaatgatgagctttttactcagtaatataaaatattgaattgttatttttgtgtgttgtttaagataaaaagccgtatttattattacggctttaattaataaaaggcaggctgtattaaaattaatattcaaagcataaaccgatagccaataccggtttcagtaatgaaatggcgtgggcgggcgggatcctgttccagtttttgtcgcagatgtcccatataaatacgcaaatagtgactgtgttcgaccgcgtttggcccccacacctggttaaggagctggcgctgggtgagtacttttccggcattgttgagcagcaccgccagcaggcggaactcaattggtgtgagatgcacctcttcctcaccccggtgaatcacgcgggcggctaaatcgacggtaacatcggaaaattttaccagcggatcgggcgcggtggtggcagagtggcggcgtaatgcgacgcgcagacgggcctgcaattcgccaatgccaaacggcttactcagataatcatccgctccggcatccagcgcggcgattttgtcgctctcttcgctgcgtgcggaaagcacaatcaccggcaccgcgctccactggcgcaggtcgcggataaactcaatcccatcaccatcgggcaggccgagatcgagaataatcaaatctggcttacgggttgccgcttccagcaagccgcgttgcagcgtttcggcctcaaagacgcgcatcccgtcgccctccagcgccgtgcgcagaaagcgacgaatagcctgttcatcttcaacaatcagaacgtttgtcacatatcctcatgaaattcttcaagttcaggggcagtttgctggggaagtgtaacacgaaaacaggcaccaccttccggtcggttgaacgcggtaatagtgcccccgtgtacatccactatcgcccgacaaattgccagtccaagccctacccccggtactgcgctctctttattcccgcgagcaaacttatcaaatatcgtctgctcctggcctggcggaagaccggggccgttatcccagacatccagttgtagattttcgccctcaacgtgggcatcgataccaatttcggcctgcgcacccgcatatttcaccgcgttctccagcagattaatcagcacccgttcaaagagtggcccgtcaacgtggattaaggtcagcggttctggcagagaaagattgatggggctgcttaaacccggttccagcatttgcagcgcgctgccgactacttcttccagcgttaaccactctttcttcaaattaaagccgccggactgaattcgcgccatatccagtagattattcaccagtcgggtagtgttcagcacatgctgacggatctcgctggcctggcgggcgtggggacttccttcgcttgccagatcgagcgttaagatttctgcctgaccaaacagcaccgtaagcggcgtgcgtaaatcatggctaagcgccgccagcagggcgttgcggatctgttcacgttcgcttgccatccgcgcctgttcttcgctggcggttagcgtcagccgctcaagggcattggcgactaacagcgtaaacgtctccagcaggcgctgctgttccgggatcatcaactggcgcagattccccggctccaccaccaccagcccgtaggttttctcgccgctttttagcggcaaaatctggtacggtacaccgggtaacgtgtcggtgcccgcgcccgcaggcaggcctttatcaaaactccactgcgcgatggcatcgtcccacggcgtcattccttgcggatgtgttaacggctgcaatttaccgttgtcatcgggcaacaacacctgactgcgggcatgaaacgtggaggcaataaattgttcgctggtggcagcgatatcctgcggactgcggcccaccgccagagctttgctcatttcatataagtgccgtgtgcgttgctcgcggtaacgggctacccgcgcctgataacgcacgccagcagtaaggttcccgatcaccagcccgacggttaacatcaccgcgaaggtcagcagatattgcacatcagagacggcgagcgtgccgcgtggggcgataaaaaagagatcgaaactcactacattaatgacggtggcaaccacactaggccagcgtccataaaatagcgccaccaccaccacgccaagcagatacagcatcaccaggttggcggcatcaaacgccatcagccactgcatggcaattaaggtgataacggcgcataacgcggcggcaaccacgcatccctgaatttgtacacgccacttgtctttaaaagagcggttatccggcgcgttgttaatcgtgcgggcgggtggttcatcaagcgcgaccagcacctgatcgagatcgggggcgatgcgcgccagtcggtcagcaaacgtttcccgacgccaccagcggcggctggccgggcgaccgagaataatcttgccgagattatgttcacgggcataacgcactaccgctttctcttccgctggatcagaaagtgttgccgtctccgcgcccagttcctgcgccagacgtaaggcgctgagaattgcccgacgttttttttccggtaagcggtgcagggcaggggtttcaacatacaccgcgtgccagacgctacccagccgactcgccagccgcgccgctgcgcggaccagtttttcgctgccggtgttatggccgatgcataaaaggatcgcgtcgcgcgtgcgccacactttctcttcgccaggatgcccccgccaggcgcgcatttgctcatcaacgcgatcggcagtacggcgcagtgccagttcgcgcagggcgatcagattacctttgcggaaaaaatgttcaatggcgcgctccgcctgcccggcaatatagactttgccttctttcagccgctggcgcagatcgtccgggggcaagtccaccagcaccacgtcgtcggcggcatcgaaaaaaggatcgggcacggtttcccgtacctgaattccggtgacgccgctgaccacatcattcagactttccagatgctgaacgttgacggtagtgaaaacatcaatgccagcttccagcagttcttcgatatcctgccagcgtttgggatgacgggaacctggcgcattactgtgcgccagttcgtccattaagatcagcgccgggcggcgggcgagggcggcatcgagatcaaactcgctgatatgccgcccacggtacgcctggcgttttaacggcagaacagccagcccttccagcatggcggcggtatcttttcgcccgtgggtttctaccacgccaaccacaatatccagcccttgcgcccgcagtcgctgggcttctgccagcatcgcccaggtcttcccgacgcctgcacaggcaccgaagaaaactttcagcttcccccgatgcggcgcggcagtttgttccagcagacgatcggggtcgggacgtaagggttcgttattcatcaagtttatccagcgccagattgagttcaacaatgttgacaaccggctggccgatatatttcaccagcggttgttggctgtattttgcgatcagttgcgtgagctgttcaacgctgagattacgcgctttcgccacgcgtgggatttgccaggccgccgcttgcggggtgatattattgtccagcccgcttgcgcttgccgtcaccagttcaaccggaacgctcgcgctggcatccgggttagcggcccgtaatgcagcaacgcgtgcggctattagtttatccagctcagggttactgaccgccagattgctcccgccagaagcctgtggattatagggcatttctgccgttgcgctcgggcgaccatgaaaatagccgttgccggtaaaattctgcccgattaatgcgctaccgcgcaccgtatcaccttcacgaatcaagctaccattggcctgccagggaaaccaccattgccccagtacggtggtcagcagcgggtaaacgccgccagtaatcaataacagaaagataaatgtacttaatgccggacgtaatccactcatggtaaacctcacaccagaccgcaaacggtcagcagtaaatcaatgactttgataccgataaacggcaccagcagcccacccagaccgtaaatccataagttacggcgcaacatggcagaagcggtaagcggtttataactcacgccttttaacgccaggggaatcaaaaagacgataatcaaggcgttgaaaatcaccgcactgaggattgcggagtcggggctatgcaggcacatgatgttcagcgcatttaactgcggatacgttgccgcgaatgccgccggaataatggcgaagtatttcgccacatcgttggcaatgctgaaggtggtcaggctgccacgggtcatcagcatctgtttgccaatgtgcaccacctcgatcaacttggtcgggttagagtcgagatcgaccatattgcccgcctctttcgccgcctgggtgccggagttcatcgccaccgcgacatctgcctgcgccagcgccggagcatcgttggtgccgtcgccggtcatcgctaccaaacgaccttccgcctgatactgacggatcaatgccagcttggcctccggtgtcgcttcggcgagaaaatcatcgacacccgcttccgcagcaatcgcggcggcagtcagacggttatcgccggtaatcatcaccgttttaatgcccattttgcgcagctgggcgaagcgctctttaataccgcctttgacgatatctttcagcgcaataacgcccagcacacgagaaccttccaccaccaccagcggcgtggctccctgacgcgcaacctgatcgactttttgatcaacatcggtagggaagtgaccaccgttagcctcaacatggcgacgaatggcatcgacagaacctttacggatcatgcggttgtcgatgttgatcccgctcatccggctttgcgcagtaaacggtacaaaggtggcatggaggctctgcacatcgcgctcgcgcaggttaaaacgctgcttggcgaggatcacaatactgcggccttccggcgtttcatcagccaggctagccagttgtgcggcgtcagccagcgttttttcatccacgccctgcgcggggataaactcgctcgcctgacggttaccgagtgtgatggtgccggttttatccagtagcagaacgtcaacgtcacctgccgcttcaactgcacgtccgctggtggcaatcacattcgcgcctagcatccggctcatcccggcgacgccgatcgcactcaacaggccgccaatagtggttgggatcagacagaccagcagcgccaccagtaccgttacgctgactgcattaccgccccacgcggaaaacggccacagcgtggcggttgccagtaaaaagacgatagtcagggcaatcagcagaatggtcagggcaatttcgttcggcgttttgcgtcgctgtgcgccttccaccatcgcgatcatccgatccagaaatgtctcgccggggttaacgctacactcaatcaccagccagtcagaaagaatacgcgtgccgccggtgacggaggcaaaatcgccgccggattcacggatcaccggtgcgctttccccggtgatggcgctttcatcgacgcttgcacccccttcaataacttcaccatcgcaggggataatatcgccagcttctaccagtacgatatcgcctttacgaagttggtcggcaggaactttgtccgccgcagcgccatatttcggctcacgcagcttgcgggcaaaggcagtttttttcacccctttcagactgttggcctgcgctttactgcggccttctgccagcgcctcggcgaaattagcgaacagtacggtgatccacagccaaccgctaatggccgcgctaaacagcgcattgccgggcatcgcaccgcttgccatcgcgatgctaatacaggtggtcagcagactgccgatccagacgataaacatcaccggattgcgccattgcgcctgcgggtttaattttttcaccgcttctttcagcgcctgaacgacaagtgttggttcgaatagcgccagttgtttacgactcatattcagtgctcactcaatatcatcaggagagatattccgccaccggaccaagcgccagggcagggataaaggtcagtgcgccaaccagcaacacggtgccgattaacaggccaacaaacagcgggccgtgcgttggcagcgtgccggagctggcggcttggctctttttactcaccaggctaccggcaattgccatcaccgggataatcaccccgaagcgaccgacaaacatgcagaacgccagtaaacagttccagaacggagagttggcgcttaatccggcaaaggcgctgccgttgttgttagcggcggaactcacggcgtacagcacttcgctaaaaccatgcgggccagggttgagcatggcgctacgtccggcgtcggtcatcatcgccaacgccgcgcccatcagcaccagcgtcggggtaaccagaattgccagtgcagtcagtttcatctcgcgtacgtcgatttttttacccagatattccggtgtacgaccaatcatcagcccggcaataaacaccgccagcaggacaaacagcatcatgccgtaaagaccagaaccgacaccgccgaacaccacttcaccaatttgcatcagccacatcggcaccatgccaccgagagcggtaaagctatcatgcatcgcaatcaccgcgccacaggaagccgccgtcgtcacgaccgcaaacaggctactgaccagcacgccgaaacggctctctttaccttccatattgatgctgctgtccgtgcccagtgccagcagatgaggattaccctgaacttctgcccacatcaccacgcctacgcagatgacaaaaatcacactcatcgcccacagcaacatgcgcccctggcggcgatcgcccatcacttcaccaaaggcaaagcacagcgccgttgggatcaagaagatcgccagcatctgcacgaagttggtcagtgcggttgggttttcaaacggatggctgctgttggcattaaagaagccaccgccgttagtaccgagcatcttgatcgcttcctgagaagctacaggccccatgggtaacagctgttgcgctccttcaacggtattcacagcctgataaggcagaaagttttgcagcgcaccttgttgaataaaaaacagtgcaatcaacaacgccacagggactagcacccataacgtgatgcgtagcagatcgacccaggcattcccgagcgtgctcatgctctggcgggtaaacgcacggatgagggcaaaaatcaccgcaatcccgctggcggcagaaagaaagttttgcaccgttaagcccgccatctggctgaaatagctcaacgtggtttcaccgctataagattgccagttggtattggtgacaaagctgacggcggtattcagcgccagatcccagctcagccctggcaactgctgtggattaagcggcagatagtgctgaccgagcaacataaaaaacagcaccgccagccccagcatgttcaggccgagaatggcacaaagatattgcttccagttcatctcacggtcagagacgccaagtgcgcgaaaaagtacgcgctcaacgcccgttgtaccgggaagaggaatgtcattaatcagccgcgccagcccgctgcctaaaggacgcgccagcaccattaacaccagtaaaaacgtggcgatcagtaagaacccttgcgcagccatcagaacgcctccgcattgatcagggcataaaccagataacccagtaataaaaacaccagcaatacgccggttatcacgcctgcactcacagtgcacctccagtggcctaaaagtgataccggaagggtagaattctggctgcaaagatttcgcaaaaatctgcgggcggggtgtaaaaaaagtataaaaatggcaaaagccatgatttaactaatgtttagtattaatttaacttttgtgtaacttaattacaggatgaatgtaaataaaccatcaataagcaaaaataagtggtcggatgagtagtaaaattacacaaaaggcggtactattttcatcagataaacaaattcatttttccggtgccattcaccgggtagatacaaaagggggagaaaagtatggaactctacagagaatatcctgcatggcttatctttttacgccgtacttatgcggttgcagcgggcgttctggcgctgcctttcatgcttttctggaaagaccgcgcccgcttttacagctacctgcatcgcgtctggagcaaaaccagcgataaaccggtgtggatggatcaggccgaaaaggcaactggtgatttttattgattgctgagttttgaatacattgaacgtctacacttactcctgtaaaccgctcaggagcagtaatgaatctacaacgatttgatgacagcaccctaatccgtatctttgcccttcatgagttacatcgactgaaagaacatggcttaacgcgcggggcgcttctcgattatcacagccgctataaactcgtctttctggcgcattctcagccggagtaccgcaaacttggcccgttcgtggctgatattcaccagtggcaaaatctggatgactattacaaccagtaccgccaacgcgtagttgttttgctttctcaccccgccaacccgcgcgatcacaccaatgttttgatgcacgttcagggttattttcgcccgcatattgattccacagaacgccagcagctggctgcgcttatcgacagttatcgccgtggcgagcaaccacttcttgcgccgctgatgcgtatcaaacactatatggcgctttatcctgacgcctggcttagtgggcagcgttatttcgaactttggccgcgtgtgattaacttgcgccatagtggagttttatgactacccatctggtctggtttcgccaggatttacgtctgcacgataatctcgcactggctgccgcctgccgcaatagctctgcacgcgtgctggcgttgtatatcgctacaccacgccagtgggcgacgcataacatgagcccgcgtcaggctgaacttatcaatgctcaactgaatgggctacaaatagcgcttgcggaaaaaggtattcctttattgttccgtgaagtggatgactttgtcgccagtgtcgaaatagttaaacaggtgtgcgcggaaaacagcgttacccacctgttttataactatcagtatgaagtgaatgagcgggcgcgggatgtggaagttgaaagagcgctgcgtaacgtggtgtgtgaaggatttgatgacagcgtgatcctgccgcctggcgcggtgatgaccggtaatcacgagatgtacaaagtctttacgccttttaagaatgcctggctgaaacggctgcgggaagggatgccggagtgcgtcgctgcgccaaaagttcgtagtagcggaagcatagagcccagcccatccattacgctgaattatcctcgtcagtctttcgatactgcgcattttccggtggaagaaaaagcggcgattgcgcaattacgccagttttgccagaacggtgccggagaatatgagcaacaacgagattttccggcagtggaaggcaccagccgtttgagcgccagcctggcaacgggcgggttaagccctcgccagtgcttgcatcgcttgttggctgaacagccgcaggcgctggacggtggggccggtagtgtctggcttaatgagctgatctggcgcgagttttaccgtcacctgataacgtatcaccccagcttgtgtaaacatcgtccatttattgcctggacggatcgtgtacagtggcagagcaatcccgcacatttacaggcctggcaggaaggcaaaacgggatacccgattgttgatgccgctatgcgtcagcttaacagcactggctggatgcataacaggctacggatgattacagccagttttctggtgaaagatttattgatcgactggcgcgaaggcgagcgatatttcatgagccagctgattgatggtgatttggcagccaataacggtggctggcagtgggccgctagtaccggaaccgatgcagcgccgtattttcgtattttcaacccgacaacccagggcgagaaatttgatcatgagggcgagtttatccgccagtggctaccggaactgcgcgatgtgccagggaaagtggtgcatgagccgtggaagtgggcgcagaaagcaggtgtgacgctggattatccgcaaccgatagtcgagcacaaagaagcgagagtacaaacgttggcagcgtatgaggcggcgcggaaggggaaataacagacgcgtcaggcaatcgagcccagatgccggatgcggcgtgaacgccttatccagcctacaaatttgtgcaaattcaataaattgcaggaaatacgtaggcctgataagacgcgtcaagcgtcgcatcaggcatcggtgctggcctattaagactccagcgccagcgcgcggtttctgaatttcagcgcctgatacagccaaatcatcagtaccagtcctacacacgccagtgcgccccaggtaatttgatcaaatacttcaatatatgcattgatggagtagttgatcgccccggaagcatcaaagctagcctggcttgtctgatcggcaatcacgcccgccagatagttcgcgatcgcgccagaaagcagcatgtagatgccggttaatacgccggtcacaccggggatttcaatgcgcgtaatttggctcatggcaaccgggtcgataaacagttccgcaaagcccatcaccgccaggcctaataccatcagtggcagagaagagtgaccatacattgcggaccagcgggcgcttaaggtcagaatgcagaatccggcgctcatcaggccaaggccaagagcaaatttcccccagatgcgcacggtacgattacccgcgacactctcttttaccacccacgccaggaacacaccgcacagcataactgcgaaggcattaatgctctggaacatcgcggtcggaacggtataaccaaacatatcgcggttaacgaagcggtcgatataaaggctaatgctgctaccgccctgttgtgcgaaggcccagaacaacatactgaagaaggtgagcgtcacaatcagccccagctccttccgctgtttctggttttctgctttgcgataaatttttgccagtacacccaggccaataatagtcgcgacaattaaggcgtatacgctccactctttccagaacagtatggtaatcagtgcaggcgttgccaccagcagaaccagcagccatccccagttcggcaggagaaagtttgtcgcacgcagtacttttttgttaacgccgcgggtatgagtgaaatgacgattgccacataagaaaatgaccagacccgcgatcatgccaaccgccgccaggccaaagcccatcgcccagctgtactcttcctgggcgtaaccacaggcgataggtgcgataatagaccccacgttacccgccgcatacatcaggctgaaaccgccatcacgacgcggatcggttggctcatacagctcgccgagcagacagcttacgttagatttaaacaggccatagccgcagacgataatcgccagggacagatagaggaaactcggatggatctcactggcacccagcaccacatgaccgatcgccatcaacaacgcccccagcatcaccgccatgcgattgccgagaactttatccgccaaaaagccaccgaggattggcgtgacatacaccaggctacagtaggcgctaaataactcgtaggcgtgagtatcgttgtattttagttgattggtgagatagagaatcagcagggcacgcatgccgtaaaagctaaaatattcccagatttgcagcgcaacgacatagtaaatagcgcgcggctgacttgcgtgtttattcataataattccacaattgacggcaacgtcacgtaatagttgcgcggcgtgcttgtgtttccttaaagttaaaactttgatacagatctgattatttatgcaatatgctgtctgattgcataaatatacattagctgaagcgtgatgatataaacaatttgcgtcttttggcgtcgggtttgtttcttaatatgtcaaaagattggctatcgacgaactggcgaggtaacgctatgttaacggtgtagctatcagaatacggaaggcgcgaagatgaaaaacaccgaactggaacaactgattaacgaaaaactgaacagcgcggcgattagtgattacgcgccgaatggtttgcaggtggaaggcaaagagacggtgcaaaaaattgttaccggtgtcaccgccagccaggctttgctcgatgaggcagtgcgtctgggcgcggatgcggtcattgtgcatcatggctacttctggaaaggagagtctccggtcattcgcggaatgaagcgtaaccgtttaaaaacgttgctggcgaatgatatcaacctgtatggctggcatttgccgcttgacgcacatcctgagctgggcaataacgcacagctggcggcgttactggggatcacggtcatgggcgaaattgagccgttggtgccgtggggcgaactgaccatgcctgtgccgggactggagctggcttcctggattgaagcgcgtctgggacgtaagccgttatggtgtggcgataccggacctgaggtggtccagcgcgtcgcctggtgcacgggcggcgggcaaagttttatcgatagcgccgcgcgttttggcgtggatgcttttattactggcgaagtttctgaacagaccattcatagtgcccgcgagcagggattgcatttttatgctgcaggtcaccatgccactgaacgtggtggtattcgcgcattgagcgagtggctgaatgaaaataccgatcttgatgtgacctttattgatattcctaatcctgcataacgaataatcagagggatcgaaagtgcaacgagcgcgttgttatctgataggtgaaacggcggtagtgctggaactggaaccgccggtgacgctggctagccagaaacggatctggcgactggcgcagcgtctggtggatatgccgaatgtggttgaagccattcccggcatgaacaatatcacggtgattttgcgtaatcctgagagcctggcgctggatgccatagagcgtttgcaacgctggtgggaggagagcgaggcgctggagccggagtctcgctttattgaaattccggtggtttacggtggtgcaggcggaccggatttggcggtggtcgcggcgcattgcgggttgagcgaaaaacaggttgttgaattgcactcctccgtggaatacgtggtctggtttttaggttttcaaccgggcttcccgtatctcgggagtttgccggaacaactacacacgccacggcgcgctgaaccgcgcttactcgttccggcaggttctgtcgggatcggcgggccgcagactggtgtttatccgctggcaacgccgggtggctggcagttgattggtcataccagtctcagcctgtttgatccggcgcgtgacgaacccatcttattacgtccgggagacagcgtgcgctttgtaccgcagaaggagggagtatgctgaagattattcgtgcgggcatgtataccactgtgcaggatggcggtcgtcacggttttcgccagagcggtatcagccactgcggcgcactggatatgcccgcgttacgcattgctaacctactggtgggtaatgacgccaatgcccccgcgctggagatcacgctcggtcagttaactgttgagttcgaaactgatgggtggtttgctctgacgggtgccggttgcgaagcgcggctggatgataatgccgtctggaccggctggcgattgccgatgaaagcaggccagcgtttaacgcttaaacgcccgcagcacgggatgcgcagttatctggcggtcgcgggtggtattgatgttccgccggtaatgggcagttgcagcaccgatctcaaagtggggattggcgggctggaaggccgtttactgaaggatggtgaccgactcccgattggcaaaagcaagcgtgattctatggaagcgcagggcgttaaacagctgctgtggggcaaccgcattcgcgccttgccggggccggaatatcatgagttcgatcgcgccagccaggatgcattctggcgtagcccctggcagcttagcagccaaagtaaccgcatgggctatcgcttacaggggcaaattttaaaacgcaccaccgatcgcgaactgttatctcacggtttgttaccgggcgtggtgcaggtgccacataacgggcagccgattgtgttgatgaacgacgcacagaccaccggtggttacccgcgtattgcctgtatcattgaggctgatatgtaccatctggcgcaaattccgctcggtcagccgattcattttgtccagtgtagtctggaagaggcactaaaagcacggcaagatcagcaacgttattttgaacaattagcgtggcggctgcacaatgaaaattgacctgaacgccgatctgggcgaaggctgcgccagcgacgcagagctattaacgctggtttcctctgccaatattgcctgtggatttcatgcaggcgatgcgcaaatcatgcaggcttgcgtgcgtgaagcaataaaaaatggtgtcgcgattggcgctcacccgagttttcccgacagggaaaattttggtcgcagcgccatgcagctgccgccagaaaccgtttacgcccagacgctgtatcaaattggcgcgctggcaacgattgcccgtgcgcaaggcggcgtaatgcgtcatgtcaaaccgcacggcatgttgtacaaccaggcggcgaaagaagcacaactggcagacgccatcgccagagcggtatacgcttgcgatccagcattgattctcgtcgggctggcgggaagcgagctgattcgtgcaggcaagcaatatggtctgacaacgcgcgaggaagtgtttgccgatcgcggttatcaggctgacggcagcctggtgccgcgaagccagagtggcgcgttgattgaaaacgaagaacaggcgctggcgcaaacgctggagatggtgcaacacggcagagtcaaaagtatcaccggcgaatgggcaacggtcgcggcgcaaacggtctgcctgcatggcgacggcgagcacgcactggcgttcgcccgccgactacgctctgcatttgccgaaaaggggattgttgtcgcagcataaccccgattaataaagaatgaaaaaaggatatcaccatgcctgaaggcccggagatccgccgtgcagcggataacctggaggcggcgatcaaaggcaaaccactaactgatgtctggtttgccttcccgcagttaaaaccttatcaaagtcaacttatcggtcaacacgttacccatgtggaaacgcgtggtaaggcgttgttaactcatttttccaacgacttaacgctctacagccataatcagctttacggcgtctggcgcgtggttgataccggcgaagagccgcagaccacgcgagtattgcgggtaaaactgcaaacggctgacaaaaccattctgctttatagcgccagcgatattgagatgttgaccccggaacaactgaccacgcatccgtttttacaacgcgttggtcccgatgtgctggatccgaatctgacgccggaggtggtgaaagaacgattattgagcccgcgctttcgtaaccgtcagtttgctggattactgctcgatcaggcgtttctggctgggcttggcaattatttgcgggtggagatcctctggcaggttgggttgactggaaatcataaagcgaaagatctcaatgcggcgcaactggatgcactcgcacacgcgttactggagattcctcgattttcctacgctacgcgggggcaggtggatgagaataagcatcatggggcgctgtttcgctttaaggtttttcatcgagatggcgaaccgtgcgaacgttgtggcagcatcattgagaaaaccacgctgagttctcgcccgttttactggtgccctggctgccagcattaagcgctccgcttcggcgcataggtactaataaaccgcgcaatggcaggccctgtcagcaaaatactgaacaggcgtagggtttgcatcgccataatgagcgccatatcggcattgctccctgcggcgatgaccgccacggtatcaagcccgccggggctggtggcgaggtaggcagtcataaaatcaatgtgcataaaccgggtcagcccccacgccatacccgcacaaatagccagcagagcaaaaatgctcagcaggatttgcggtagcgggcgtagtgcccgcagtaagatttgtttatcgaaaccaagaccaatccgccagccaattgccatatacgccatcgccagcagccattccggtagttcgatggtgatgagctgaccagactggagcactgcgcccgccagcatcgggatgagcatcgtgccggaaggaagacgcagcaggcatcccactgtaccggcaacgaccgcgagcaaaatagtaagcaggagattaatgctcactggcgggaaccagacgatatgctggttaaccgcttcagcgttatcgcccagcatcatgcgggtgaccagaacagcggcccccgcgacgaacagcactcgcagatattgcataaacgccaccaggcgaatatctgcgccgtaatcttgcgccatagcgaccattgccgccgcgccgccaggagaggagccccaggcaccggtatttccaggcaaactgctatagcgcaccaataaccaacccacaatggcgctggaaagcagcgttaccagtaaaattgcaagcacgatcggccagttgacggccagggtggtgagaatgctaccagtgaggttttgcgcaatcatgcagccaagaatggcctgggcggcgagaaaagcagagcggggaagttgcagagtaattccgcgcatactaaagatgatcccggcgatcatcggcccaagtaatagcgccgccgggagatgtaccgcgaggaaaccaatagaaaggagaagacttagcacacataacattccccactgcaaaactggcatccttcgctccctcattattttctctttggtgtatcgatacagcataaagaaagctgggccaggaaaaaataacagcaatcaaggaaaaggggaaaatcagcaattttctgaaagagatgccctttccggcggcaaagggcatcatggtaaatcagttatagttaatcttaaaaagcaccactgtatcgaaggggccagcctcgatgggggtgcctggaatggagctaagttcagccgtataggttttttcgtagaccaacatgtcactggtgaaatcggcgtattcagcatatttattgaaggtataagggctggcgttttcatccagtaaacgtagcttcagaccattaccaatcaacaatgctttatcttcttcaaccaacgtttcttcggtataaaaggaggaactgactttaaatccgtcggtgcattgatcgttttggctcttggtcgttttaatactgaacgttttgctcattgtgtggcgacgtatatccagcaaattaaatttaccaaaatcaatcacctgtgtttccggactaatggaaaaattgacgctgcaatccagcacgcgaatgttttccagaccagtaatatgatatttcaggttttgggcagtagggtcttcgttaacgctaccggcaccgtcaaattgcacgacgatatagtcgctaagcgtactttgataatcatgcggcggcatttctcgtattttgacgtataaccgcatgcgagcgagaaaggtacggctcatatgaatattagcgggatcgccgctgcaaattttgttctgccatcccatcgcgatgatctgctcaggggtataaatatcaatgttcttactgtcgatacactggttagtgtcgatgcgactttttcccagactggcatcgtaatcgacaccgttgtatgtcacgccgagttgataataacgatcctgcacccccggataggggtttacccaggcgtagacatgctcgctttcaaagttgccgttggtattgttgtcacaatagacgggaattttaatatcgtcagattcccagatcttatcaccgggtttggcattgcctggtacagcaaacggttgaatcgcttcacttttttctactgcgccaccagatgtaccaaaatagcagttcagcgccattgcagacttcaacggcagaaataacaggcagatgacgagcaacaatcccttgccagcactcatttcgcctccactgcttgtaaacggcattgtccgctgcagttgagcgtcgtcatgcgtaatgcgccgtaatcatccatgtaaccgagataaaactggctgccgctataacttccggtgtttgtgttgaccgtactaaaaggtgcaaccatcacggttttgaagcctgggagaacgcctttttcatttctccccagataggcaatggtcagataatacgcggtaggatttttcagtgtcagttggttgccctgctggctgacctgtaactgcagttcgaccttttctcctgctttcttgcgtaatgcagccggtcgccagaacaatttaatacgactttgaatagcgacctgaagtatcgcatggtcgctgcttttatccggagcgggaggaatttcgcgcatattgtagaaaaatagcgtttcgcgatcgccaggtaattgtgtggtactggcttgtttcacaacccgcacctggcttgtcgctttcggttccagacgttgaatagggggcaaagcgaccagaagagcatcgcttttctcccctttttcattttctatccaggaataagcaagataaggcagtttgtcactttggttttcgatacgcaggctggtggctttgtcattggcgttaaacacaatgcgtgtgcgatcgggttgcaccgcagcattgcaacccaagctgatggttaacaacattaagggtaatcctttaataaatgtcattctcttttccttaattaatgacaaggtaaaatcaggcgtttggtcgtgtcttccagacgttctggcagatgaataatgcagctttgctcaccccagaccacggtaaacagttgattttcagcgacaccgcttaaccaggcatgtccttcctcgccaaccatacccacgctaatgccgctgtcatcctggcggatatccgcaccgaggggagggaactgaccgctggcgttgcgtatgatgacgttaacgtctttaccggaacgggaagccagacttttgtaacctatcgcgccttcaatccatgtttccttgatgacgttttctgcaactgttacgccgtcgggtaagtcattcatgttcaccgccacggtggaaggctggtaactggaaatcaacggcaccaccgcaatgccaaaatggttggtgtagtcgagattgccctgaaccggaatatctgccacgccatcggtgctgaccatcaggcgtggttcattggtggagctgcggcgatgaaatgctgcaccatattgggttgcggtgaaagaaccgctccagctgctgctgacggaactgtaatcactggcggcataggtaccagaaatatcccactcacccgcactactcaggtgctgatagttaccgctcacctgggctccattgtccggacgatcggattgcagtccggcagacatgccccagctattacgttcatccagcgtatcgttccagctcatgcggtgtatggtgctgtggctactgttttgcatgtcatagccaacccgaccaccgttaccgaaggggaggctaatgctcagataaatctggttgtcgcgatctttatcttcgtagtgggtcgtattgaaactcgtgctaatgctgatatctctccagtcaccaatatcaacattaaaacctgctgtgatgttggcggtcgtggaggcgtctgcattccaccaggtttgatgtagcaggttggcgtaaagattgaggtttagtggggtaatcggttggcccacggataagctgatcgtctgtttttcgtcctgcgcatcgctgtcgttgtatttgtgatccagatagttggcgtagctgtgaaaatgacgatcactgaagcgataagcggcgaggctaatcgtgctgttggtggcatccacttgtttgctgtaattaaaacggtagcttaagccccgctcgtcctgctgagtatcaaaatggctactggcccaggtgacatcaaaggacagtgcgccaagccacagcatattttgcccgatacccattgcggcagaatggtagtcatcatcagaaatcagcaggccgccgtacaggctggtgttactgagcatcccccaggaaacttcattgctaaaaaaggtttcattttcagtttgatgactcatggaaggccgtggctgacccgcggccaatttatagcgaacctgtccctggcgagtcaggaagggcgtgcttgctgcgctaacctggaaattgttcacccgaccatcttcttccgtcactttgacatccagcgtgccctgaacagactgattgaggtcatcaataataaacgggcctggcgggacttttttctggtaaatgacgcggccactttgactgatcgtcaccgtggcattggtctgtgcaataccgctaatttgtggggcgtagccacgcagctcccacggtaacattcgatcgtcactcgccagtgccgcgccggtataagaaaaaccatcgaaaatattggaactgaaatcggtttcgccgagggttaacttagagcctaattgcggtaatggacgaaaaagataggtgcggcttattccgccactctggtcatggttatcttcgctatcggtcttattaagctggtaatcactgcgtaagcgccatgccccggcgttaattccggcggtaccgtaggcattcaggttagtgctgctgctgccgtcctgtgggcggtagctgctggcaaacaagttgtaatccatcaggacaccggcaacaccttctttccatgtagaggggggagcccagttttcactgtgccacgccagccaggcttgcggaatactaatattcagttgctgattggcttgatcgaaattgaagagcatttcaggtcgggaactgaaatcaatacaccgatctatctgtggcaaggactgacggacatctggttttaaaccaaatttatcgaccagactatcattgatgcatggaatggttttgtcaccctttttttgccagttaattttttgcccattactgattttgttgttattcaccgcaacgctaacaaaatattcaccgggagcaatgactcctttttcctttaataaactaatatcaatgcggtcgcgcatacttttatcgagaacattcagattgaattcgaccgccattgcgcaaggcatcgccatgaccaggcaggatacaaaagagagtcgataaatattcacggtgtccatacctgataaatattttatgaaaggcggcgatgatgccgccaaaataatacttatttataatccagcacgtaggttgcgttagcggttacttcacctgccgtgacatcgactgcattatcaatttgttccatccaggcgaaaaagttcagcgtctgttcactactgcttgcatccaggtcaagatctggcgcggcactacctaatacgatgttaccgtcatttttgtccatcagtcgtacaccgaccccagttgcttcgcctgcactggtgttgctcaacaaaggcgtagcaccagttgtcttagccgtgctatcgaaggttacgccaactttggataccggcattccgctaccgttgtcagaagcaggcagatcacagttgatcaagcgaatgtcgacggccactttattgctatgatgctcccggtttatatgggttgtcgtgacttgtccaagatctatgtttttatcaatatcttctggatgaatttcacaaggtgcttcaataacctcccccttaaagtgaatttcgccagaaccttcatcagcagcataaacaggtgcagtgaacagcagagatacggccagtgcggccaatgttttttgtcctttaaacataacagagtcctttaaggatatagaataggggtatagctacgccagaatatcgtatttgattattgctagtttttagttttgcttaaaaatattgttagttttattaaatgcaaaactaaattattggtatcatgaatttgttgtatgatgaataaaatataggggggtatagatagacgtcattttcatagggttataaatgcgactaccatgaagtttttaattgaaagtattgggttgctgataatttgagctgttctattctttttaaatatctatataggtctgttaatggattttatttttacaattttttgtgtttaggcatataaaaatcaacccgccatatgaacggcgggttaaaatatttacaacttagcaatcaaccattaacgcttgatatcgcttttaaagtcgcgtttttcatatcctgtatacagctgacgcggacgggcaatcttcataccgtcactgtgcatttcgctccagtgggcgatccagccaacggtacgtgccattgcgaaaatgacggtgaacatggaagacggaatacccatcgctttcaggatgataccagagtagaaatcgacgttcgggtacagtttcttctcgataaagtacgggtcgttcagcgcgatgttttccagctccatagccacttccagcaggtcatccttcgtgcccagctctttcagcacttcatggcaggtttcacgcattacggtggcgcgcgggtcgtaatttttgtacacgcggtgaccgaagcccatcaggcggaaagaatcatttttgtctttcgcacgacgaacaaattccggaatgtgtttaacggagctgatttcttccagcattttcagcgccgcttcgttagcaccgccgtgcgcaggtccccacagactagcaatacctgctgcgatacaggcaaacgggttcgcaccgctagagccagcggtacgcacggtggaggtagaggcgttctgttcatggtcagcgtgcaggatcagaatacggtccatagcacgttccagaatcggattaacttcatacggttcgcacggcgtggagaacatcatattcaggaagttaccggcgtaggagagatcgttgcgcgggtaaacaaatggctgaccaatggaatacttgtaacacatcgcggccatggtcggcattttgctcagcaggcggaacgcggcaatttcacggtgacgaggattgttaacatccaggctgtcgtgatagaacgccgccagcgcgccggtaataccacacatgactgccattggatggctgtcgcgacggaaagcatggaacagacgggtaatctgctcgtggatcatggtatgacgggtcaccgtagttttaaattcgtcatactgttcctgagtcggtttttcaccattcagcaggatgtaacaaacttccaggtagttagaatcggtcgccagctgatcgatcgggaaaccgcggtgcagcaaaataccttcatcaccatcaataaaagtaattttagattcgcaggatgcggtactagtgaagcctgggtcaaaggtgaacacacctttactaccgagagtacggatatcaataacatcttgacccagcgtgcctttcagcacatccagttcaacagctgtatccccgttgagggtgagttttgcttttgtatcagccatttaaggtctccttagcgccttattgcgtaagactgccggaacttaaatttgccttcgcacatcaacctggctttacccgttttttatttggctcgccgctctgtgaaagaggggaaaacctgggtacagagctctgggcgcttgcaggtaaaggatccattgatgacgaataaatggcgaatcaagtacttagcaatccgaattattaaacttgtctaccactaataactgtcccgaatgaattggtcaatacttccacactgttacataagttaatcttaggtgaaataccgacttcataacttttacgcattatatgcttttcctggtaatgtttgtaacaactttgttgaatgattgtcaaattagatgattaaaaattaaataaatgttgttatcgtgacctggatcactgttcaggataaaacccgacaaactatatgtaggttaattgtaatgattttgtgaacagcctatactgccgccaggtctccggaacaccctgcaatcccgagccacccagcgttgtaacgtgtcgttttcgcatctggaagcagtgttttgcatgacgcgcagttatagaaaggacgctgtctgacccgcaagcagaccggaggaaggaaatcccgacgtctccaggtaacagaaagttaacctctgtgcccgtagtccccagggaataataagaacagcatgtgggcgttattcatgataagaaatgtgaaaaaacaaagacctgttaatctggacctacagaccatccggttccccatcacggcgatagcgtccattctccatcgcgtttccggtgtgatcacctttgttgcagtgggcatcctgctgtggcttctgggtaccagcctctcttcccctgaaggtttcgagcaagcttccgcgattatgggcagcttcttcgtcaaatttatcatgtggggcatccttaccgctctggcgtatcacgtcgtcgtaggtattcgccacatgatgatggattttggctatctggaagaaacattcgaagcgggtaaacgctccgccaaaatctcctttgttattactgtcgtgcttagtcttctcgcaggagtcctcgtatggtaagcaacgcctccgcattaggacgcaatggcgtacatgatttcatcctcgttcgcgctaccgctatcgtcctgacgctctacatcatttatatggtcggttttttcgctaccagtggcgagctgacatatgaagtctggatcggtttcttcgcctctgcgttcaccaaagtgttcaccctgctggcgctgttttctatcttgatccatgcctggatcggcatgtggcaggtgttgaccgactacgttaaaccgctggctttgcgcctgatgctgcaactggtgattgtcgttgcactggtggtttacgtgatttatggattcgttgtggtgtggggtgtgtgatgaaattgccagtcagagaatttgatgcagttgtgattggtgccggtggcgcaggtatgcgcgcggcgctgcaaatttcccagagcggccagacctgtgcgctgctctctaaagtcttcccgacccgttcccataccgtttctgcgcaaggcggcattaccgttgcgctgggtaatacccatgaagataactgggaatggcatatgtacgacaccgtgaaagggagcgactatatcggtgaccaggacgcgattgaatatatgtgtaaaaccgggccggaagcgattctggaactcgaacacatgggcctgccgttcagccgtctcgatgatggtcgtatctatcaacgtccgtttggcggtcagagcaaaaacttcggcggcgagcaggcggcacgcactgcggcagcagctgaccgtaccggtcacgcactgttgcacacgctttatcagcagaacctgaaaaaccacaccaccattttctccgagtggtatgcgctggatctggtgaaaaaccaggatggcgcggtggtgggttgtaccgcactgtgcatcgaaaccggtgaagtggtttatttcaaagcccgcgctaccgtgctggcgactggcggagcagggcgtatttatcagtccaccaccaacgcccacattaacaccggcgacggtgtcggcatggctatccgtgccggcgtaccggtgcaggatatggaaatgtggcagttccacccgaccggcattgccggtgcgggcgtactggtcaccgaaggttgccgtggtgaaggcggttatctgctgaacaaacatggcgaacgttttatggagcgttatgcgccgaacgccaaagacctggcgggccgtgacgtggttgcgcgttccatcatgatcgaaatccgtgaaggtcgcggctgtgatggtccgtgggggccacacgcgaaactgaaactcgatcacctgggtaaagaagttctcgaatcccgtctgccgggtatcctggagctttcccgtaccttcgctcacgtcgatccggtgaaagagccgattccggttatcccaacctgtcactacatgatgggcggtattccgaccaaagttaccggtcaggcactgactgtgaatgagaaaggcgaagatgtggttgttccgggactgtttgccgttggtgaaatcgcttgtgtaagcgtacacggcgctaaccgtctgggcggcaacagcctgctggacctggtggtctttggtcgcgcggcaggtctgcatctgcaagagtctatcgccgagcagggcgcactgcgcgatgccagcgagtctgatgttgaagcgtctctggatcgcctgaaccgctggaacaataatcgtaacggtgaagatccggtggcgatccgtaaagcgctgcaagaatgtatgcagcataacttcagcgtcttccgtgaaggtgatgcgatggcgaaagggcttgagcagttgaaagtgatccgcgagcgtctgaaaaatgcccgtctggatgacacttccagcgagttcaacacccagcgcgttgagtgcctggaactggataacctgatggaaacggcgtatgcaacggctgtttctgccaacttccgtaccgaaagccgtggcgcgcatagccgcttcgacttcccggatcgtgatgatgaaaactggctgtgccactccctgtatctgccagagagcgaatccatgacgcgccgaagcgtcaacatggaaccgaaactgcgcccggcattcccgccgaagattcgtacttactaatgcggagacaggaaaatgagactcgagtttagtatttatcgctataacccggatgttgatgatgctccgcgtatgcaggattacaccctggaagcggatgaaggtcgcgacatgatgctgctggatgcgcttatccagctaaaagagaaagatcccagcctgagcttccgccgctcctgccgtgaaggtgtgtgcggttccgacggtctgaacatgaacggcaagaatggtctggcctgtattaccccgattagcgcactcaaccagccgggcaagaagattgtgattcgcccgctgccaggtttaccggtgatccgcgatttggtggtagacatgggacaattctatgcgcaatatgagaaaattaagccttacctgttgaataatggacaaaatccgccagctcgcgagcatttacagatgccagagcagcgcgaaaaactcgacgggctgtatgaatgtattctctgcgcatgttgtagtacctcttgtccgtctttctggtggaatcccgataagtttatcggcccggcaggcttgttagcggcatatcgtttcctgattgatagccgtgataccgagactgacagccgcctcgacggtttgagtgatgcattcagcgtattccgctgtcacagcatcatgaactgcgtcagtgtatgtccgaaggggctgaacccgacgcgcgccatcggccatatcaagagcatgttgttgcaacgtaatgcgtaaaccgtaggcctgataagacgcgcaagcgtcgcatcaggcaaccagtgccggatgcggcgtgaacgccttatccggcctacaagtcattacccgtaggcctgataagcgcagcgcatcaggcgtaacaaagaaatgcaggaaatctttaaaaactgcccctgacactaagacagtttttaaaggttccttcgcgagccactacgtagacaagagctcgcaagtgaaccccggcacgcacatcactgtgcgtggtagtatccacggcgaagtaagcataaaaaagatgcttaagggatcacgatgcagaacagcgctttgaaagcctggttggactcttcttacctctctggcgcaaaccagagctggatagaacagctctatgaagacttcttaaccgatcctgacagcgttgacgctaactggcgtaacacgttccagcagttacctggtacgggagtcaaaccggatcaattccactctcaaacgcgtgaatatttccgccgcctggcgaaagacgctagtcgttactctagtacgatctccgaccctgacaccaatgtgaagcaggttaaagtcctgcagctcattaacgcataccgcttccgtggtcaccagcatgcgaatctcgatccgctgggactgtggcagcaagataaagtggccgatctggatccgtctttccacgatctgaccgaagcagacttccaggagaccttcaacgtcggtagttttgccagcggcaaagaaaccatgaaactcggcgagctgctggaagccctcaagcaaacctactgcggcccgattggtgccgagtatatgcacattaccagcaccgaagaaaaacgctggatccaacagcgtatcgagtctggtcgcgcgactttcaatagcgaagagaaaaaacgcttcttaagcgaactgaccgccgctgaaggtcttgaacgttacctcggcgcaaaattccctggcgcaaaacgcttcagcctggaaggcggtgacgcgttaatcccgatgcttaaagagatgatccgccacgctggcaacagcggcacccgcgaagtggttctcgggatggcgcaccgtggtcgtctgaacgtgctggtgaacgtgctgggtaaaaaaccgcaagacttgttcgacgagttcgccggtaaacataaagaacacctcggcacgggtgacgtgaaataccacatgggcttcagctctgacttccagaccgatggcggcctggtgcacctggcgctggcgtttaacccgtctcaccttgagattgtaagcccggtagttatcggttctgttcgtgcccgtctggacagacttgatgagccgagcagcaacaaagtgctgccaatcaccatccacggtgacgccgcagtgaccgggcagggcgtggttcaggaaaccctgaacatgagcaaagcgcgtggttatgaagttggcggtacggtacgtatcgttatcaacaaccaggttggtttcaccacctctaatccgctggatgcccgttctacgccgtactgtactgatatcggtaagatggttcaggccccgattttccacgttaacgcggacgatccggaagccgttgcctttgtgacccgtctggcgctcgatttccgtaacacctttaaacgtgatgtcttcatcgacctggtgtgctaccgccgtcacggccacaacgaagccgacgagccgagcgcaacccagccgctgatgtatcagaaaatcaaaaaacatccgacaccgcgcaaaatctacgctgacaagctggagcaggaaaaagtggcgacgctggaagatgccaccgagatggttaacctgtaccgcgatgcgctggatgctggcgattgcgtagtggcagagtggcgtccgatgaacatgcactctttcacctggagcccgtacctcaaccacgaatgggacgaagagtacccgaacaaagttgagatgaagcgcctgcaggagctggcgaaacgcatcagcacggtgccggaagcagttgaaatgcagtctcgcgttgccaagatttatggcgatcgccaggcgatggctgccggtgagaaactgttcgactggggcggtgcggaaaacctcgcttacgccacgctggttgatgaaggcattccggttcgcctgagcggtgaagactccggtcgcggtaccttcttccaccgccacgcggtgatccacaaccagtctaacggttccacttacacgccgctgcaacatatccataacgggcagggcgcgttccgtgtctgggactccgtactgtctgaagaagcagtgctggcgtttgaatatggttatgccaccgcagaaccacgcactctgaccatctgggaagcgcagttcggtgacttcgccaacggtgcgcaggtggttatcgaccagttcatctcctctggcgaacagaaatggggccggatgtgtggtctggtgatgttgctgccgcacggttacgaagggcaggggccggagcactcctccgcgcgtctggaacgttatctgcaactttgtgctgagcaaaacatgcaggtttgcgtaccgtctaccccggcacaggtttaccacatgctgcgtcgtcaggcgctgcgcgggatgcgtcgtccgctggtcgtgatgagcccgaaatccctgctgcgtcatccgctggcggtttccagcctcgaagaactggcgaacggcaccttcctgccagccatcggtgaaatcgacgagcttgatccgaagggcgtgaagcgcgtagtgatgtgttctggtaaggtttattacgacctgctggaacagcgtcgtaagaacaatcaacacgatgtcgccattgtgcgtatcgagcaactctacccgttcccgcataaagcgatgcaggaagtgttgcagcagtttgctcacgtcaaggattttgtctggtgccaggaagagccgctcaaccagggcgcatggtactgcagccagcatcatttccgtgaagtgattccgtttggggcttctctgcgttatgcaggccgcccggcctccgcctctccggcggtagggtatatgtccgttcaccagaaacagcaacaagatctggttaatgacgcgctgaacgtcgaataaataaaggatacacaatgagtagcgtagatattctggtccctgacctgcctgaatccgtagccgatgccaccgtcgcaacctggcataaaaaacccggcgacgcagtcgtacgtgatgaagtgctggtagaaatcgaaactgacaaagtggtactggaagtaccggcaagtgcagacggcattctggatgcggttctggaagatgaaggtacaacggtaacgtctcgtcagatccttggtcgcctgcgtgaaggcaacagcgccggtaaagaaaccagcgccaaatctgaagagaaagcgtccactccggcgcaacgccagcaggcgtctctggaagagcaaaacaacgatgcgttaagcccggcgatccgtcgcctgctggctgaacacaatctcgacgccagcgccattaaaggcaccggtgtgggtggtcgtctgactcgtgaagatgtggaaaaacatctggcgaaagccccggcgaaagagtctgctccggcagcggctgctccggcggcgcaaccggctctggctgcacgtagtgaaaaacgtgtcccgatgactcgcctgcgtaagcgtgtggcagagcgtctgctggaagcgaaaaactccaccgccatgctgaccacgttcaacgaagtcaacatgaagccgattatggatctgcgtaagcagtacggtgaagcgtttgaaaaacgccacggcatccgtctgggctttatgtccttctacgtgaaagcggtggttgaagccctgaaacgttacccggaagtgaacgcttctatcgacggcgatgacgtggtttaccacaactatttcgacgtcagcatggcggtttctacgccgcgcggcctggtgacgccggttctgcgtgatgtcgataccctcggcatggcagacatcgagaagaaaatcaaagagctggcagtcaaaggccgtgacggcaagctgaccgttgaagatctgaccggtggtaacttcaccatcaccaacggtggtgtgttcggttccctgatgtctacgccgatcatcaacccgccgcagagcgcaattctgggtatgcacgctatcaaagatcgtccgatggcggtgaatggtcaggttgagatcctgccgatgatgtacctggcgctgtcctacgatcaccgtctgatcgatggtcgcgaatccgtgggcttcctggtaacgatcaaagagttgctggaagatccgacgcgtctgctgctggacgtgtaatagtttaagtttcacctgcactgtagaccggataaggcattatcgccttctccggcaattgaagcctgatgcgacgctgacgcgtcttatcaggcctacgggaccaccaatgtaggtcggataaggcgcaagcgccgcatccgacaagcgatgcctgatgtgacgtttaacgtgtcttatcaggcctacgggtgaccgacaatgcccggaagcgatacgaaatattcggtctacggtttaaaagataacgattactgaaggatggacagaacacatgaacttacatgaatatcaggcaaaacaactttttgcccgctatggcttaccagcaccggtgggttatgcctgtactactccgcgcgaagcagaagaagccgctagtaaaatcggtgccggtccgtgggtagtgaaatgtcaggttcacgctggtggccgcggtaaagcgggcggtgtgaaagttgtaaacagcaaagaagacatccgtgcttttgcagaaaactggctgggcaagcgtctggtaacgtatcaaacagatgccaatggccaaccggttaaccagattctggttgaagcagcgaccgatatcgctaaagagctgtatctcggtgccgttgttgaccgtagttcccgtcgtgtggtctttatggcctccaccgaaggcggcgtggaaatcgaaaaagtggcggaagaaactccgcacctgatccataaagttgcgcttgatccgctgactggcccgatgccgtatcagggacgcgagctggcgttcaaactgggtctggaaggtaaactggttcagcagttcaccaaaatcttcatgggcctggcgaccattttcctggagcgcgacctggcgttgatcgaaatcaacccgctggtcatcaccaaacagggcgatctgatttgcctcgacggcaaactgggcgctgacggcaacgcactgttccgccagcctgatctgcgcgaaatgcgtgaccagagccaggaagatccgcgtgaagcacaggctgcacagtgggaactgaactacgttgcgctggacggtaacatcggttgtatggttaacggcgcaggtctggcgatgggtacgatggacatcgttaaactgcacggcggcgaaccggctaacttccttgacgttggcggcggcgcaaccaaagaacgtgtaaccgaagcgttcaaaatcatcctctctgacgacaaagtgaaagccgttctggttaacatcttcggcggtatcgttcgttgcgacctgatcgctgacggtatcatcggcgcggtagcagaagtgggtgttaacgtaccggtcgtggtacgtctggaaggtaacaacgccgaactcggcgcgaagaaactggctgacagcggcctgaatattattgcagcaaaaggtctgacggatgcagctcagcaggttgttgccgcagtggaggggaaataatgtccattttaatcgataaaaacaccaaggttatctgccagggctttaccggtagccaggggactttccacagtgaacaggccattgcatacggcactaaaatggttggcggcgtaaccccaggtaaaggcggcaccacccacctcggcctgccggtgttcaacaccgtgcgtgaagccgttgctgccactggcgctaccgcttctgttatctacgtaccagcaccgttctgcaaagactccattctggaagccatcgacgcaggcatcaaactgattatcaccatcactgaaggcatcccgacgctggatatgctgaccgtgaaagtgaagctggatgaagcaggcgttcgtatgatcggcccgaactgcccaggcgttatcactccgggtgaatgcaaaatcggtatccagcctggtcacattcacaaaccgggtaaagtgggtatcgtttcccgttccggtacactgacctatgaagcggttaaacagaccacggattacggtttcggtcagagcacctgtgtcggtatcggcggtgacccgatcccgggctctaactttatcgacattctcgaaatgttcgaaaaagatccgcagaccgaagcgatcgtgatgatcggtgagatcggcggtagcgctgaagaagaagcagctgcgtacatcaaagagcacgttaccaagccagttgtgggttacatcgctggtgtgactgcgccgaaaggcaaacgtatgggccacgcgggtgccatcattgccggtgggaaagggactgcggatgagaaattcgctgctctggaagccgcaggcgtgaaaaccgttcgcagcctggcggatatcggtgaagcactgaaaactgttctgaaataaatatctgtaataagaaatagccctcgccgcttccctctacaggaatggcgaagggctgtcggtttcgacatggttggccatcgtatgatggccttttttgtgcttatcggctactttttcgctgcgctatcagggtaaatttatagtcatcggtattaaaagcgttgcggctatattcaaacacccgaccatcaactaaatatccacggcttactttttcaagaatcggctttgtctggctgatattaagcagacggctcatctcttcggttggcatcagaggaatgatttcctgttcgctacgatcgataaccattttcttcacttcttcgataaagtgatatttgctattttccatgacctgccaggtgagatccgggaacaacgcaagcggcatccaggtttcttccagcgccattggcttttgcttgcgatagcgcacgcgcttcacatgccacacacgatcctgcggggtgatttgtagctgttgctgaagaaaatcgtcagccggaatcacttcgaatatcagaacttcactgtgtgtatcgacgtgacggtcgctcagtttttcatcaaaactggttaactgaaaaatatcgtaattgacccgctcttctttgacgtaagtcccgctgccctgaatgctttcgaggatctgctgctcgactagctggcgcaaagcctgacgcaccgtaacccggctgacgccaaactctgtttgtagcgcactttcagtgggtaacgcatcgccaggtttaagctcgccacgcgcaatttgttcacgaatgcgatcggcaatctgccggtataagggcttgtgtcccatttttagtatctcattaatacgaatttaaccattatgcccgataaattcatcctgtaaataatacaaatacaatacaaataatttcaatcaagtgaaattgatcacataatggtattgttttatcgggcacactggcgcgactataaaaacgatcaagtgaggatcatgatgaatctgacgactctgacccaccgcgatgcgttgtgtctgaatgcgcgctttaccagccgtgaagaggccatccacgcgttgactcaacgtcttgctgctctggggaaaatttccagtactgagcaatttctggaagaagtgtatcgccgtgaaagccttggcccgaccgccttaggtgaagggttggctgtgccgcatggcaaaactgctgcggtaaaagaagcggcgtttgcggtcgccacactcagcgagccgcttcagtgggaaggcgttgatggcccggaagcagttgatttagtggtgctgctggcgattccccccaatgaagcgggtactacgcatatgcaactgctgacagcgctgaccacgcgccttgcggatgatgagattcgggcgcgtatacagagcgcgacgacgcctgatgagttgctcagcgcgctggatgacaagggaggcacgcaaccttctgcctctttttccaacgcgccaactatcgtctgcgtaacggcctgtccggcgggtattgctcacacctatatggctgcggaatatctggaaaaagccggacgcaaactcggcgtaaatgtttacgttgaaaaacaaggcgctaacggcattgaagggcgtttaacggcggatcaactcaatagtgcaaccgcctgtatttttgcggctgaagtcgccatcaaggagagtgagcgttttaatggcattcccgcgcttagtgtgcctgttgccgagccgattcgccatgcagaagcgttgatccaacaagcgcttaccctcaagcgtagcgatgagacgcgtaccgtacagcaagatacgcaaccggtgaaaagtgtcaaaacggagctgaaacaggcactgttgagcggaatctcttttgccgtaccgttgattgtcgcggggggcacggtgctggcggtcgcggtattactgagccaaatcttcgggctacaagatctgtttaatgaagaaaactcctggctgtggatgtaccgcaagctgggcggcgggctgctcggaattttgatggtaccggtgctcgcggcctataccgcctattctctggcagataaaccggcgttagcgccaggctttgcggctggacttgccgccaacatgatcggctccgggtttctcggcgcggtcgttggcggattgatagccggttacttgatgcgctgggtgaaaaatcacttgcgtcttagcagtaaattcaatggattcctgactttttatctctacccggtgctcggtacgttgggagcgggcagtctgatgctgtttgtggtgggggaacctgtcgcctggatcaataacagccttaccgcctggctgaacggtctgagtggaagtaacgcgctgttgctgggtgccattctcggttttatgtgttcctttgaccttggagggccagtgaataaagccgcttatgcattctgcctgggcgcaatggcgaacggcgtttacggcccgtatgccattttcgcctccgtcaaaatggttagcgcatttaccgtaaccgcttccacgatgctcgcaccgcgcctgtttaaagagtttgaaattgagaccgggaaatccacctggctgttagggctggcaggtattaccgaaggggcgatcccgatggcgattgaagatccgctgcgggttattggtagctttgtgctgggctctatggtaacgggcgctattgtcggtgcgatgaatatcggccttagcacacccggtgccggcattttcagcctctttttacttcatgataatggcgcgggcggtgttatggcggcaattggctggtttggcgcggcattggtgggggctgcaatcagcactgcaattctcctgatgtggcggcgtcacgcggttaagcatggcaactatctgactgatggcgtaatgccataaacaaaaaggaaacgacgatgaaagcagtatctcgcgttcacatcaccccgcatatgcactgggatcgagagtggtatttcaccaccgaagagagtcgtattctgctggtcaataatatggaagagatcctgtgccgactggaacaggacaacgaatacaaatattacgtactcgacgggcaaacggcgatcctcgaagattatttcgcggtgaaaccggaaaacaaagaccgtgtgaagaaacaggtagaagccggcaagttgattatcggcccctggtatacccagaccgataccacgattgtttctgcggaatccatcgtccgtaatctgatgtacggaatgcgtgactgcctcgcgtttggcgagccgatgaaaataggttatttaccagattcctttggcatgtccgggcaactgccgcatatctacaatggatttggcattacccgcaccatgttctggcgcggatgtagcgagcgccacggtactgataaaaccgagtttttgtggcaaagcagtgacggtagcgaagtgacggcgcaggtgctgccgctgggctacgccatcggtaagtacttacctgccgacgaaaacggattacgtaaacgcctcgacagttattttgacgtgctggaaaaagcgtctgtaaccaaagagattttgctgccgaatgggcatgaccagatgccattgcagcaaaatatcttcgaagtgatggataagctacgtgagatctaccctcaacgtaagtttgtgatgagccgctttgaagaggtatttgagaagatcgaagcgcagcgagataatctggcaaccctgaaaggggaatttattgatggcaaatatatgcgcgtgcatcgcaccatcggttctacgcgtatggatatcaaaattgcccacgcgcgtattgaaaataagattgttaatctgctggaaccgctggcaacactggcctggacgttgggttttgaataccaccacggcttgctggagaaaatgtggaaagagatcttaaaaaatcatgcccacgacagtatcggctgctgctgtagtgacaaagttcatcgcgaaatcgtcgcccgcttcgaactggctgaagacatggcggataatctgattcgtttctacatgcgcaaaattgccgacaacatgccgcagagcgacgccgacaaactcgtcctgtttaacctgatgccctggccgcgtgaagaagttatcaacaccactgtgcggctgcgcgccagccagtttaatttgcgggacgatcgcggtcagcctgtaccgtattttattcgccatgcccgtgagatcgatccaggcctaatcgatcggcaaatagttcattacggtaattacgatccctttatggagtttgatatacagatcaaccagattgtcccttctatgggctatcgcacgctttatatcgaagcgaatcagcctggcaacgtaattgcggcaaaaagtgacgctgaagggatactggaaaatgctttctggcaaattgcgctcaatgaggatggttctctgcaactggtagataaagacagcggtgtgcgctatgaccgggtattgcaaattgaagaaagctctgatgatggtgatgaatatgactatagtcccgcaaaagaagagtgggtaattaccgcagcgaacgcgaaaccgcaatgcgatattattcatgaagcctggcagagcagggctgttatccgctatgacatggcagtgccgctcaatttgagtgaacgcagcgcccggcaatccactggcagagtaggggtggtgttggttgtcactcttagtcataacagcaggcgtattgatgtggatatcaatcttgataaccaggctgacgatcatcgccttcgtgtcctggtccctacaccttttaacaccgacagtgttctggcagatacgcagtttggtagcctaacgcgccccgtgaacgacagtgcaatgaacaactggcagcaagaaggctggaaagaagcgccggttccggtatggaatatgctcaactatgttgccttacaggaagggcgtaacggcatggctgtctttagcgaagggttacgtgaatttgaagtcatcggtgaagagaagaaaacctttgccattacgttgctgcgtggcgtgggcttactgggcaaagaagatctgcttttaaggcctgggcggcctagcggaattaaaatgccagtcccggacagtcaactacgtggtctgctttcttgtcgcctaagtttattgagttataccggtacgccaaccgccgctggtgtagctcagcaggcgcgagcatggctgactccagtacagtgttacaacaaaatcccatgggatgtgatgaagctcaacaaagccggattcaacgtgccggaaagttatagtttgttgaaaatgcccccagtgggatgcctgataagcgcacttaagaaagctgaagaccgacaagaagtgattttacggctgtttaatccggctgaaagtgcaacctgtgatgcgactgttgctttcagtcgcgaggtgatttcttgcagtgaaacgatgatggatgaacacattaccaccgaggaaaatcaaggtagtaatctaagcgggccttttttacccggccagagtcggacgttcagttaccggcttgcctgaatagcaatcaaaccgaagccacatatgcgcggccagattgttgacaaagggcgctttgttcatgccggatacggcatgaacgctttattcggtctacaaaagcaggcaaattcaatatattgcagagatgatgtagacactggcaagcgtagcgcatcaggtaattttgcgtttatcttcactctcaagccacgtatatgtggctttatttttaacaaaataataaccctgggtgagttaattataatataattataagttaactaaatgttaatattggcggggtggatttatgcctttattagtaatcctgaaactctgcgtcgtattagccagtgaccaaaaaaagaattaaggtcaaccgtgctgtttttgcttcgtctctttttatctttaattgccaaccgaaactaatttcagccttataactcacacattttaaacataaatgtcactaaagttaccttattgaaacatgattaacataatttgtaggaattgatatttatcaatgtataagtcttggaaatgggcatcaaaaagagataaattgttctcgatcaaattggctgaaaggcggtaatttagctataaattgatcaccgtcgaaaaatgcaaatttgcttcaacaaaaacctgtttattgtaaggattttgcggcgtaatatatacgtgggatcaatttgagtttttattaacatgtttgcaacctttctttacgccgtttttgtgtgcattcacatggtatgatgaaagtgttcaaacaaatttctattggggcatgcgtgtgaccctttctaacggggttcactctcggagtcttcatgcgatgagcaaggagtcatgatgttagatatagtcgaactgagccgcttacagtttgccttgaccgcgatgtaccacttcctttttgtgccactgacgctcggtatggcgttcctgctggccattatggaaacggtctacgtcctctccggcaaacagatttataaagatatgaccaagttctggggcaagttgtttggtatcaacttcgctctgggtgtggctaccggtctgaccatggagttccagttcgggactaactggtcttactattcccactatgtaggggatatcttcggtgcgccgctggcaatcgaaggtctgatggccttcttcctcgaatccacctttgtaggtctgttcttcttcggttgggatcgtctgggtaaagttcagcatatgtgtgtcacctggctggtggcgctcggtagtaacctgtccgcactgtggattctggttgcgaacggctggatgcaaaacccaatcgcgtccgatttcaactttgaaactatgcgtatggagatggtgagcttctccgagctggtgcttaacccggttgctcaggtgaaattcgttcacactgtagcgtctggttatgtgactggcgcgatgttcatcctcggtatcagcgcatggtatatgctgaaaggtcgtgacttcgccttcgctaaacgctcctttgctatcgctgccagcttcggtatggctgctgttctgtctgttattgttctgggtgatgaatccggctacgaaatgggcgacgtgcagaaaaccaaactggctgctattgaagccgagtgggaaacgcaacctgcgcctgctgcctttactctgttcggcattcctgatcaggaagaggagacgaacaaatttgcgattcagatcccttacgcactgggcatcattgcaacgcgttccgtggataccccggttatcggcctgaaagagctgatggtgcagcatgaagaacgcattcgtaacgggatgaaggcgtactctctgctcgaacaactgcgttctggttctaccgaccaggcggttcgtgaccagttcaatagcatgaagaaagacctcggttacggtctgctgctgaaacgctatacgccaaacgtggctgatgcgactgaagcgcagattcaacaggcaaccaaagactccatcccgcgtgtagcgccgctgtactttgcgttccgtatcatggtggcgtgtggcttcctgcttctggcaatcatcgcgctctctttctggagtgtcatccgcaaccgcattggcgagaaaaaatggcttctgcgcgccgcgctgtacggtattccgctgccgtggattgctgtagaagcgggctggttcgtggctgaatatggccgccaaccgtgggctatcggtgaagtgctgccgacagctgtggcgaacagcagtctgaccgcaggcgatctcatcttcagtatggtgctgatttgcggcctgtataccctgttcctggtggcagaattgttcttaatgttcaagtttgcacgcctcggcccaagcagcctgaaaaccggtcgctatcactttgagcagtcttccacgactactcagccggcacgctaagacaggagtcgtcaaatgatcgattatgaagtattgcgttttatctggtggctgctggttggcgttctgctgattggttttgcagtcactgacggtttcgacatgggggtgggcatgctcacccgtttcctcggtcgtaacgacaccgagcgtcgaattatgattaactccattgcaccacactgggacggtaaccaggtttggctgatcaccgcgggcggcgcactctttgctgcctggccgatggtctatgccgctgcgttctccggcttctatgtggcgatgatcctcgtgctggcgtctttgttcttccgtccggtcggttttgactaccgctccaagattgaagaaacccgctggcgtaacatgtgggactggggcatcttcattggtagcttcgttccgccgctggtaattggtgtagcgttcggtaacctgttgcagggcgtaccgttcaacgttgatgaatatctgcgtctgtactacaccggtaacttcttccagttgcttaacccgttcggcctgctggcaggcgtggtgagcgtagggatgatcattactcagggcgcaacctatctgcaaatgcgtaccgtgggcgaactgcacctgcgtacccgtgcaacggctcaggtggctgcgctggtgacactggtctgtttcgcactggctggcgtatgggtgatgtacggtatcgatggttatgtcgtgaaaagcacaatggaccattacgcagcctctaacccactgaataaagaagtggttcgtgaagctggcgcatggctggttaacttcaacaacacgccaattctgtgggctattccggcactgggtgtggttctgccgctgctgaccatcctgactgcacgtatggataaagccgcgtgggcgtttgtgttctcctccctgacgctggcctgcatcatcctgacagccggtatcgcaatgttcccgtttgtgatgccgtccagcaccatgatgaacgcaagtctgacaatgtgggatgcaacttccagccagctgacgcttaacgtcatgacctgggttgcggtggttctggtaccgatcattctgctctacaccgcctggtgttactggaaaatgttcggtcgtatcaccaaagaagatattgaacgtaacacccactctctgtactaagtaaggagctaaaaatgtggtatttcgcatggattctgggaacgcttcttgcctgtagctttggggtaatcaccgcgctggcgcttgaacacgtcgaaagtggcaaagccggtcaagaagacatctgatgagtaagattatcgcgactttgtatgcggtaatggacaagcgccccctgcgggcgctttccttcgtgatggcgcttctgttagcaggatgtatgttttgggacccatctcgttttgccgcgaagaccagtgaactggaaatctggcatggtttattgctgatgtgggccgtctgtgctggtgtgattcacggcgtgggctttcgtccgcagaaggttctttggcaagggattttttgcccattgcttgccgatattgttctcattgtcgggctgattttcttcttcttttaaatcagaattctctttaaaaaattatgggccgctccaggcccataaatttttacgctcccttaacttgccctcattcccaaacctcaatcgcgcgcgtatagtagcagcgtttaaaagctctaacttttgttgcattaccgggatgtaaagtgaatacaacgctgtttcgatggccggttcgcgtctactatgaagataccgatgccggtggtgtggtgtaccacgccagttacgtcgctttttatgaaagagcacgcacagagatgctgcgtcatcatcacttcagtcagcaggcgctgatggctgaacgcgttgcctttgtggtacgtaaaatgacggtggaatattacgcacctgcgcggctcgacgatatgctcgaaatacagactgaaataacaagtatgcgtggcacctctttggttttcacgcaacgtattgtcaacgccgagaatactttgctgaatgaagcagaggttctggttgtttgcgttgacccactcaaaatgaagcctcgtgcgcttcccaagtctattgtcgcggagtttaagcagtgactgacatgaatatccttgatttgttcctgaaggctagccttctggttaaacttatcatgttgattttgattggttttagtatcgcatcttgggccattattatccagcggacccgtattcttaacgcagcggcgcgcgaagccgaagcgtttgaagataaattctggtctggaatcgaactctctcgcctctatcaagagagccaggggaaacgggataatctgactggtagcgaacaaatcttttacagcgggttcaaagagtttgtgcgcctgcatcgtgccaatagccatgcgccggaagccgtagtggaaggggcgagccgtgctatgcgtatctccatgaaccgtgaacttgaaaatctggaaacgcacattccgttcctcggtacggttggctccatcagcccgtatattggtctgtttggtacggtctgggggatcatgcacgcctttatcgccctcggggcggtaaaacaagcaacactgcaaatggttgcgcccggtatcgcagaagcgttgattgcgactgcaattggtctgtttgccgctatcccggcagttatggcctacaaccgcctcaaccagcgcgtaaacaaactggaactgaattacgacaactttatggaagagtttaccgcgattctgcaccgccaggcgtttaccgttagcgagagcaacaaggggtaagccatggccagagcgcgtggacgaggtcgtcgcgatctcaagtccgaaatcaacattgtaccgttgctggacgtactgctggtgctgttgctgatctttatggcgacagcgcccatcatcacccagagcgtggaggtcgatctgccagacgctactgaaagtcaggcggtgagcagtaacgataatccgccagtgattgttgaagtgtctggtattggtcagtacaccgtggtggttgagaaagatcgcctggagcgtttaccaccagagcaggtggtggcggaagtgtccagccgtttcaaggccaacccgaaaacggtctttctgatcggtggcgcaaaagatgtgccttacgatgaaataattaaagcactgaacttgttacatagtgcgggtgtgaaaagcgttggtttaatgacgcagcctatctaaacatctgcgtttcccttgcttgaaagagagcgggtaacaggcgaacagtttttggaaaccgagagtgagtaaggcaaccgaacaaaacgacaagctcaagcgggcgataattattagtgcagtgctgcatgtcatcttatttgcggcgctgatctggagtagcttcgatgagaatatagaagctagtgccggaggcggcggtggtagctccatcgacgctgtcttggttgatagtggtgcggtagttgagcagtacaaacgcatgcaaagccaggaaagtagcgcgaagcgttctgatgaacagcgcaagatgaaggaacagcaggctgctgaagaactgcgtgagaaacaagcggctgaacaggaacgcctgaagcaacttgagaaagagcggttagcggctcaggagcagaaaaagcaggctgaagaagccgcaaaacaggccgagttaaagcagaagcaagctgaagaggcggcagcgaaagcggcggcagatgctaaagcgaaggccgaagcagatgctaaagctgcggaagaagcagcgaagaaagcggctgcagacgcaaagaaaaaagcagaagcagaagccgccaaagccgcagccgaagcgcagaaaaaagccgaggcagccgctgcggcactgaagaagaaagcggaagcggcagaagcagctgcagctgaagcaagaaagaaagcggcaactgaagctgctgaaaaagccaaagcagaagctgagaagaaagcggctgctgaaaaggctgcagctgataagaaagcggcagcagagaaagctgcagccgacaaaaaagcagcagaaaaagcggctgctgaaaaggcagcagctgataagaaagcagcggcagaaaaagccgccgcagacaaaaaagcggcagcggcaaaagctgcagctgaaaaagccgctgcagcaaaagcggccgcagaggcagatgatattttcggtgagctaagctctggtaagaatgcaccgaaaacggggggaggggcgaaagggaacaatgctagccctgccgggagtggtaatactaaaaacaatggcgcaagtggggccgatatcaataactatgccgggcagattaaatctgctatcgaaagtaagttctatgacgcaagctcctatgcaggcaaaacctgtacgctgcgcataaaactggcacccgatggtatgttactggatatcaaacctgaaggtggcgatcccgcactttgtcaggctgcgttggcagcagctaaacttgcgaagatcccgaaaccaccaagccaggcagtatatgaagtgttcaaaaacgcgccattggacttcaaaccgtaatcgcgatgttgactgttcggacggtcaacatcaggcaccggttgccacggggttctggtagttttgtgtattttagtttgttaacattctgctaaattatcgtgggccatcggtccagataagggagatatgatgaagcaggcattacgagtagcatttggttttctcatactgtgggcaagtgttctgcatgctgaagtccgcattgtgatcgacagcggtgtagattccggtcgtcctattggtgttgttcctttccagtgggcggggcctggtgcggcacctgaagatattggcggcatcgttgctgctgacttgcgtaacagcggtaaatttaatccgttagatcgcgctcgtctgccacagcagccgggtagtgcgcaggaagtacaaccagctgcatggtccgcactgggcattgacgctgtagttgtcggtcaggtcactccgaatccggatggttcttacaatgttgcttatcaacttgttgacactggcggcgcaccgggtactgtacttgctcagaacagctacaaagtgaacaagcagtggctgcgttatgctggtcataccgccagtgatgaagtgtttgaaaaactgaccggcattaaaggtgcgttccgtactcgtattgcctacgttgttcagaccaacggcggtcagttcccgtatgaactgcgcgtatctgactatgacggttacaaccagtttgtcgttcaccgtagtccgcagccgctgatgtctccggcgtggagtccagacggttctaaactggcttatgtgaccttcgaaagcggtcgttccgcgctggttattcagacgctggcaaatggcgctgtacgtcaggtggctagtttcccgcgtcacaacggtgcacctgcattcagcccagacggcagcaaactggcattcgccttgagcaaaaccggtagtctgaacctgtacgtaatggatttggcttctggtcagatccgccaggtgactgatggtcgcagtaacaataccgaaccgacctggttcccggatagccagaacctggcatttacttctgaccaggccggtcgtccgcaggtttataaagtgaatatcaacggcggtgcgccacaacgtattacctgggaaggtagccagaaccaggatgcggatgtcagcagcgacggtaaatttatggtaatggtcagctccaatggtgggcagcagcacattgccaaacaagatctggcaacgggaggcgtacaagttctgagctccacgttcctggatgaaacgccaagtctggcacctaacggcactatggtaatctacagctcttctcaggggatgggatccgtgctgaatttggtttctacagatgggcgtttcaaagcgcgtcttccggcaactgatggacaggtcaaattccctgcctggagcccgtatctgtgataataattaattgaatagtaaaggaatcattgaaatgcaactgaacaaagtgctgaaagggctgatgattgctctgcctgttatggcaattgcggcatgttcttccaacaagaacgccagcaatgacggcagcgaaggcatgctgggtgccggcactggtatggatgcgaacggcggcaacggcaacatgtcttccgaagagcaggctcgtctgcaaatgcaacagctgcagcagaacaacatcgtttacttcgatctggacaagtacgatatccgttctgacttcgctcaaatgctggatgcacatgcaaacttcctgcgtagcaacccgtcttacaaagtcaccgtagaaggtcacgcggacgaacgtggtactccggaatacaacatctccctgggtgaacgtcgtgcgaacgccgttaagatgtacctgcagggtaaaggcgtttctgcagaccagatctccatcgtttcttacggtaaagaaaaacctgcagtactgggtcatgacgaagcggcatactccaaaaaccgtcgtgcggtactggtttactaagagaattgcatgagcagtaacttcagacatcaactattgagtctgagcttactggttggtatagcggccccctgggccgcttttgctcaggcaccaatcagtagtgtcggcagtggcagcgtcgaagaccgcgtcactcaacttgagcgtatttctaatgctcacagccagcttttaacccaactccagcaacaactttctgataatcaatccgatattgattccctgcgtggtcagattcaggaaaatcagtatcaactgaatcaggtcgtggagcggcaaaagcagatcctgttgcagatcgacagcctcagcagcggtggtgcagcggcgcaaagtaccagcggcgatcaaagcggtgcggcggcaagtacgacgccgacagctgatgctggtactgcgaatgctggcgcgccggtgaaaagcggtaatgcaaacacggattacaatgcagctattgcgctggtgcaggataaatcccgccaggatgacgcaatggtggcatttcagaatttcatcaaaaattaccctgatagtacttacctgccaaacgccaattattggctgggtcagttaaactacaacaagggtaaaaaagatgatgcggcgtactattttgctagcgtagtgaaaaactatccgaagagtccaaaggctgcagatgcgatgtttaaagtcggcgtcatcatgcaggacaaaggtgacaccgcaaaagcgaaagccgtataccagcaggttatcagtaaataccctggtactgatggcgctaaacaggcacaaaaacgtctgaacgcgatgtaatgcataacacacgaccagaagtcgcattatttctggtcgtgtcgtgcgaatcataagcagttgagtgatctacatcgaaatttttgttgcgctcaagtctgaaatcagtaatatatgccgccgttgccacgggatatcaaacaaaccgaaagcaacgaaaaagtgggtcgttagctcagttggtagagcagttgacttttaatcaattggtcgcaggttcgaatcctgcacgacccaccaatcgctaaggtggaagcggtagtaaaacgtgaaggataacgttgcatgagcaacggcccgaagggcgagacgaagtcgagtcatcctgcacgacccaccactaacatagttagttgtagtatccagcgtagtatcgggtgattagctcagctgggagagcacctcccttacaaggagggggtcggcggttcgatcccgtcatcacccaccaccgggtcgttagctcagttggtagagcagttgacttttaatcaattggtcgcaggttcgaatcctgcacgacccaccagttttaacatcgaagacagatgttaagcgtgtaggataacgttgcgtcagcaacggcccgtagggcgagcgaagcgagtcatcctgcacgacccaccactaatgacggtgggttcggtggaagtagtttgtagtatccagcgcagtatcgggtgattagctcagctgggagagcacctcccttacaaggagggggtcggcggttcgatcccgtcatcacccaccactcgggtcgttagctcagttggtagagcagttgacttttaatcaattggtcgcaggttcgaatcctgcacgacccaccagttttaacatcaaactcagatgttaagcgtgaaggataacgttgcgccagcaacggcccgtagggcgagcgaagcgagtcatcctgcacgacccaccaatcttaaagattggccccgagtaaaaatctttcaggtaacacccgtatgggtcgttagctcagttggtagagcagttgacttttaatcaattggtcgcaggttcgaatcctgcacgacccaccaatttaaaggtggttactggtagagaacgtgaaggataacgttgcgttagcaacggcccgaagggcgagacgaagtcgagtcatcctgcacgacccaccatcctgaatgattaaggcagcataatcccgcaaggggtcgttagctcagttggtagagcagttgacttttaatcaattggtcgcaggttcgaatcctgcacgacccaccaatgtaaaaaagcgccctaaaggcgcttttttgctatctgcgatactcaaagattcgaacctgcagcaggtttgagttgagcgcagcgaaacaacggagccgctcgcggcgacggcccgaagggcgagcgaagcgagtcatcctgcacgacccaccaatgtaaaaaagcgccctaaaggcgcttttttgctattcaggcatcctcaatttcactttgtaaacctgatgacatcgtcagagcttactgtgcaagcaactctatgtcggtggaattaggcgtaaaatgacgcatcctgcacattaggcgtaattcgagtgacttttccccaccattcgactatcttgtttagcatataaaacaaattacaccgataacagcgaatattacgctaatgtcggttttaacgttaagcctgtaaaacgagatggtaagatgagcgtaatgtttgatccagacacggcgatttatcctttccccccgaagccgacgccgttaagcattgatgaaaaagcgtattaccgcgagaagataaaacgtctgctaaaagaacgtaatgcggtgatggttgcccactactataccgatcccgaaattcaacaactggcagaagaaaccggtggctgtatttctgattctctggaaatggcgcgcttcggtgcaaagcatcccgcttctactttgttagtcgctggggtgagatttatgggagaaaccgccaaaattctcagtccggaaaaaacaattctgatgccgacacttcaggctgaatgtagtctggatctcggctgccctgttgaagaatttaacgcattttgcgatgcccatcccgatcgtactgtcgtcgtctacgccaacacttctgctgcggtaaaagcgcgcgcagattgggtggtaactagtagcattgccgtcgaacttattgatcatcttgatagtttgggtgaaaaaatcatctgggcacccgacaaacatctggggcgttacgtgcaaaaacagacgggtggagacattctatgctggcagggtgcctgtattgtgcatgatgaatttaagactcaggcgttaacccgcttgcaagaagaatacccggatgctgccatactggtgcatccagaaagtccacaagctattgtcgatatggcggatgcggtcggttccaccagtcaactgatcgctgctgcgaaaacattgccacatcagaggcttattgtggcaaccgatcggggtattttctacaaaatgcagcaggcggtgccagataaagagttactggaagcaccaaccgcaggtgagggtgcaacctgccgcagctgcgcgcattgtccgtggatggccatgaatggccttcaggccatcgcagaggcattagaacaggaaggaagcaatcacgaggttcatgttgatgaaaggctgcgagagagggcgctggtgccgctcaatcgtatgctggattttgcggctacactacgtggataacgaataataaggcgtaacgttacgctttgggggaaagatggatttttttagtgtgcagaatatcctggtacatataccaataggggcaggcggttatgatctcagttggatcgaagcggtaggcacgatcgccgggttgctgtgtattggccttgccagtctggagaagatcagcaactacttctttggcctgatcaacgtcaccttgtttggcattattttctttcagattcagctgtatgccagcctgctattacaggtgtttttctttgccgcgaatatttacggttggtatgcgtggagccgacaaaccagtcagaacgaggcggagttgaaaattcgctggttgccattgccgaaggcactcagctggttggcggtttgcgttgttagcattggtctgatgacggtatttatcaatccggtgtttgcatttttgacccgcgtggcagtcatgatcatgcaagcattaggattacaggttgtgatgcctgaactgcaaccggacgctttcccgttctgggatagttgcatgatggtgttatctatcgtggcaatgattctgatgacgcgtaagtatgtggaaaactggctgttgtgggtgattattaacgtgattagcgtcgttatttttgcacttcagggcgtttacgccatgtctctggagtacatcatcctgacctttattgcgctcaacggcagccggatgtggatcaacagcgcacgtgaaagaggcagtcgcgcgctgtcccattaatggtgatgatgactatggccagacaccccttcattcaggtggcagtctggcccatgacaaggttgatattccatctgaatggtggcgtgctcaatctgatagtgatccatcaggtagtgttggatctgatccaacaaggcatcgtgatcgtgtggcgggatcacctgcacatgcaacgtcatcaccggcttctcgcctaccatccatacatgtacatggtgcacattgcggacttccgggatttcccggcacatacgacgcttcagttcagcgatatccaggcttaccggtgcaccttcaagtaattcattcacgctatctttcaacagtcgccacgcgctacgcagaaccagaaggctcaccagtatgctgagaatggggtcagcaggtgtccagccagtccagataataatcaacgcggcaataatagccccaacgctacccagcaggtccccgagcacatgcagtgccgctgctcgtacgttgaggtttttctcttcgctgccgtgatgaagtaaccagaaagaaagtatatttgccagcaacccagccacggcaattgccatcatcatgccgccctcgaccggacgcggcgtgcggaagcgttctatcgcctcccagacaatcaaaatggtaattaccacgagggctatggcattcacaaacgccgcgagcgtggtcagtcttagccaaccgaaagtgtggcgaatggtgggaggacgacgactaaattgcacggcgagtagggcgaaaagcagggcggcagtatcggtcaacatatgacccgcatcggccagcaatgccagagaaccagaaagaaaaccaccaacgacttctaccagcataaacccggcagtcacgccgaaagcatacaacaagcgacgagcattattatcttctggcaggtgactggacgtgtgactgtgactgtgcgccatgacgagtcatcccttaattattctcacttaactttatgacatcatactgcttttagaagtgaaaaattaaaagggagagactccgctctcccattattggctattttgcagggttactgcgtggtaccgtcggttttggtatcgacatcattattgatgccatcaccggtttgtacctttttattgatatccggacagcgaccatctttgcacatggtgttcttgtgctcttcatctttggtcattccgtcattgttcatactagaaccatcgctatgcagcattgtgccgccagaaccggtatttaccccgttattgtcgacgttatttggcgcgacattttcacgggcgtcaggggctacctggcccgcatcagctgcggcgtttgcctggccgttattagtttgcgctccgctatcggcagccagtgcggcaccgctggcaaggcttagagtggcagtcagaaataatgtggccagttttgtcattttcataggatgctcctgttatggtcgttatgtcggataacctcttccaacagtgcatttgcaggtgaatataaggcattggtttaagatttcagccaggttatgaaacgcagcagagaatcttgaaataattaacaaacaaaggagttacagttagaaattgtaggagagatctcgtttttcgcgacaatctggcgtttttcttgctaattccaggattaatccgttcatagtgtaaaaccccgtttacacattctgacggaagatatagattggaagtattgcattcactaagataagtatggcaacactggaacagacatgaattatcagaacgacgatttacgcatcaaagaaatcaaagagttacttcctcctgtcgcattgctggaaaaattccccgctactgaaaatgccgcgaatacggttgcccatgcccgaaaagcgatccataagatcctgaaaggtaatgatgatcgcctgttggttgtgattggcccatgcagtattcatgatcctgtcgcggcaaaagagtatgccactcgcttgctggcgctgcgtgaagagctgaaagatgagctggaaatcgtaatgcgcgtctattttgaaaagccgcgtaccacggtgggctggaaagggctgattaacgatccgcatatggataatagcttccagatcaacgacggtctgcgtatagcccgtaaattgctgcttgatattaacgacagcggtctgccagcggcaggtgagtttctcgatatgatcaccccacaatatctcgctgacctgatgagctggggcgcaattggcgcacgtaccaccgaaagccaggtgcaccgcgaactggcaagtgggctttcttgtccggtcggcttcaaaaatggcaccgacggtacgattaaagtggctatcgatgccattaatgccgccggtgcgccgcactgcttcctgtccgtaacgaaatgggggcatagcgcgattgtgaataccagcggtaacggcgattgccatatcattctgcgcggcggtaaagagcctaactacagcgcgaagcacgttgctgaagtgaaagaagggctgaacaaagcaggcctgccagcacaggtgatgatcgatttcagccatgctaacagctccaaacaattcaaaaagcagatggatgtttgtgctgacgtttgccagcagattgccggtggcgaaaaggccattattggcgtgatggtggaaagccatctggtggaaggcaatcagagcctcgagagcggggagccgctggcctacggtaagagcatcaccgatgcctgcatcggctgggaagataccgatgctctgttacgtcaactggcgaatgcagtaaaagcgcgtcgcgggtaaggtttaattgtcggatgcgccgtcagagtggcgtatccgatgaatcaccacaggcctgataagtcgcgcagcgtcgcatcaggcaatgtgctccattgttagcaacaaaaaagccgactcacttgcagtcggctttctcattttaaacgaatgacgtttacttcgctttaccctggtttgcaaccgccgctgctttcgctgcgatctcgtcagcattacccagataatagcgtttcagcggtttgaaattctcgtcgaactcatacaccagcggcacgccagtcgggatattaagctcaagaatctcttcttcgctcatgttatcaagatatttcaccagcgcacgtaaagagttaccgtgtgcagcgatgatcacgcgctcaccgctcttcatacgcggcagaatagtttcattccagtaagggatcacgcggtcaatggtcagcgccaggctttccgtcagcggcagttctttctcgctcagtttcgcgtaacgcggatcgtgacccggataacgctcatcatctttagtcagttccggcggagtcactgcaaaaccacgacgccactgtttcacctgctcgtcgccatacttttcagcagtttccgctttgttcagaccctgcaacgcaccgtagtgacgttcgttcagtttccaggatttctcaacgggcagccatgcctgatccagttcgtccagcacattccacagggtatggatagcgcgtttcagcacagaagtgtaagcaaagtcaaagctgtaaccttcctctttcagcagcttacctgctgcttttgcttcgcttacgcctttctcagacagatccacgtcgtaccaaccggtgaaacggttttctttgttccactgactttcgccatgacgaaccagaaccagcttagttacagccatatacttactcctcaaatcatcttttaatgataataattctcattatattgccgcgacgaagcaacagcaatgcttacgcataaccatagcgaaaatagtggcgcagtgtaaggttgttgtgaatattgagttgcaaatatgtcggtgtttgctggtgatttgaacaatatgagataaagccctcatgacgagggcgtaacattactcagcaataaactgatattccgtcaggctggaatactcttcgccaggacgcaggaagcagtccggttgcggccattcagggtggttcgggctgtccggtagaaactcgctttccagagccagcccttgccagtcggcgtaaggttcggttccccggctcggtgtgccgccgaggaagttgccggagtagaattgcagagccggagcggtggtgtagaccttcagctgcaatttttcatctgcactccagacatgcgccgccactttcttgccatcgcctttggcctgtaacaagaatgcgtgatcgtaacctttcactttgcgctgatcgtcgtcggcaagaaactcactggcgatgattttggcgctgcggaaatcaaaagacgttccggcgacagatttcaggccgtcgtgcggaatgccgccttcatcaaccggcagatattcgtccgccagaatctgcaacttgtgattgcgcacgtcagactgctcgccgtcaagattgaaatagacgtgattagtcatattcaccgggcaaggtttatcaactgtggcgcgataagtaatggagatacggttatcgtcggtcagacgatattgcaccgtcgcgccgagattacccgggaagccctgatcaccatcatcactactcagggcaaacagcacctgacgatcgttctggttcacaatctgccagcgacgtttgtcgaacccttccggcccgccgtgcagctggttaacgccctgacttgggctaagcgtcacggtttcaccgtcaaaggtataacggctattggcgatacggttggcataacgaccaatagaggcccccagaaacgcggcctgatcctgatagcattccgggctggcacagccgagcagcgcctcgcggacgctgccatcggaaagcggaatacgggcggaaagtaaagtcgcaccccagtccatcagcgtgactaccatccctgcgttgttacgcaaagttaacagtcggtacggctgaccatcgggtgccagtgcgggagtttcgttcagcactgtcctgctccttgacttggtttacaaacgtaaaaagtctctttaatacctgtttttgcttcatattgttcagcgacagcttgctgtacggcaggcaccagctcttccgggatcagcgcgacgatacagccgccaaatccgccgccggtcatgcgtacgccacctttgtcgccaatcacagctttgacgatttctaccagagtgtcaatttgcggcacggtgatttcgaaatcatcgcgcatagaggcatgagactccgccatcaactcgcccatacgtttcaggtcgccttgctccagcgcgctggcagcttcaacggtgcgggcgttttcagtcagtatatgacgcacgcgttttgccacgatcgggtccagttcatgcgcaacagcgttgaactcttcaatggtgacatcacgcagggctggctgctggaagaaacgcgcaccggtttcgcactgttcacgacgggtgttgtattcgctgccaaccagggtacgtttgaagttactgttgatgatgacgacagccacacctttgggcatggaaactgctttggtccccagactgcggcaatcgatcagcaaggcatgatctttcttgccgagcgcggaaattagctgatccatgatcccgcagttacagcctacaaactggttttctgcttcctgaccgttaagcgcgatttgtgcgccgtccagcggcagatgataaagctgctgcaatacggttccgaccgcgacttccagactagcggaagaacttaacccggcaccctgcggcacattgccgctgatcaccatgtccacgccgccgaagctgttgttacgcagttgcagatgtttcaccacgccacgaacgtagttagcccattgatagttttcatgtgcgacaatgggcgcatcgagggaaaactcgtcgagctgattttcataatcggctgccatcacgcgaactttacggtcatcgcgtggtgcacaactgatcacggtttgataatcaatcgcgcagggcagaacgaaaccgtcgttgtagtcggtgtgttcaccaatcaaattcacgcggccaggcgcctgaatggtgtgagtggcagggtagccaaatgcgttggcaaacagagattgtgttttttctttcagactcatttcttacactccggattcgcgaaaatggatatcgctgactgcgcgcaaacgctctgctgcctgttctgcggtcaggtctcgctgggtctctgccagcatttcataaccaaccataaatttacgtacggtggcggagcgcagcagaggcggataaaagtgcgcgtgcagctgccagtgttgattctcttcgccattaaatggcgcgccgtgccagcccatagagtaggggaaggagcactggaagaggttgtcataacgactggtcagctttttcaacgccagcgccagatcgctgcgctgggcgtcggtcaaatcggtgatccgtaaaacgtgggctttgggcagcagtagcgtttcgaacggccaggcagcccagtaaggcacgacggctaaccagtgttcggtttcgacaacggtacggctaccgtctgccagctcgcgctgaacataatccaccagcattggacttttctgttcggcaaaatattctttttgcaggcggtcttcgcgctcagcttcgttaggcaggaagctatttgcccaaatctgaccgtgcggatgcgggttagagcagcccatcgccgcgcctttgttttcaaaaacctgcacccatgggtacgttttccccagttctgcggtttgctcctgccaggttttgacgatttccgtcaatgctgcaacgctgagctctggcagcgttttactgtgatccggactaaagcagatcacccggctggtgccgcgcgcgctctggcaacgcatcagcggatcgtgactttctggcgcatctggcgtgtcagacatcaaagccgcaaagtcattagtgaaaacgtaagtcccggtgtaatcggggtttttatcgcctgtcacccgcacattacctgcgcagaggaagcaatctggatcgtgcgcaggtaacacctgtttggctggcgtttcctgcgccccctgccaggggcgcttagcgcggtgcggactaaccagaatccattgcccggtgagcgggttgtagcggcgatgtggatgatcaacgggattaaattgcgtcatggtcgttccttaatcgggatatccctgtggatggcgactctgccagtgccaggtgtcctgcgccatttcatcgagtgtgcgcgttacgcgccagttcagttcacggtcggctttgctggcgtccgcccagtaggccggaaggtcgccctcgcgacgcggtgcaaaatgataattaaccggtttgccgcaggctttgctgaaggcattaaccacgtccagcacgctgttgcctacgccagcgccgaggttgtagatgtgtacgcctggcttgttcgccagtttttccatcgccacgacgtgaccgtccgccagatccattacgtggatgtaatcgcgtacgccagtaccatcttcggtcggataatcgttaccaaaaatcgccaggctgtcgcgacggcctacagcaacctgggcgatgtatggcatcaggttattcggaatgccttgcggatcttcgcccatatcgccgctcggatgcgcgccaaccgggttgaagtagcgcagcagggcaatgctccagtccggctgggctttttgcagatcggtgaggatctgttccaccatcagcttgcttttgccgtaagggctttgcggtgtgccggtcgggaagctttcaacgtatggaattttgggctgatcgccataaacggtggcggaggagctaaaaataaagtttttgacgttagcggcgcgcatggcgctaatcaggcgcagagtgccgttgacattgttgtcgtaatattccagcggtttttgtacgctttcgcccacggctttcagcccggcgaagtggatcacggtgtcgatagcgtgatcgtgcaggatctcggtcatcaacgcttcgttacgaatatcgccttcaacaaacgttggatgtttgccgcctaaacgctcgataacaggcagtacgatgcgcttactgttacagaggttatcaagaatgatgacatcatgaccgttttgcagtaattgcacacaggtatgacttccaatgtaaccgctaccaccggtaaccagaactctcataattcgctccattaggcttatggtatgaaataaccatagcataacaaagatgcgaaaagtgtgacatggaataaattagtggaatcgtttacacaagaatttagccgttttttatgcgcgattaagtgattataaaacagagggtttatgaatgattgcgctttttatctgaaaaaagacgcggtttcatgcctgcatgcgtcgaaccgttggccggagagggtgctaaggccgcctccggcaaggtcagcactaccgactcaatatatttttgtcagcacatagcgatagagtccaccgtccggcacgaactcaagacgatgggtaatacaggcaggcgcatcttcagcgtggtggctaacaaacaacaattgcgtttcaccttcgctaatcagcacatcaacaaaacggcggataagctggcgattcagcggatcaagcccctgtagtggttcatcgagaataagcaacgtcggatgtttcaccagtgcgcggacaatcagcgccagacgctgctgtccccaggaaagactatggaacggagcgtcagccgtgcgtttatcaatgccgagaatatccagccactgctgcaccagtttttgctggcgatcgctaacggcctgataaatgccaatgctatcaaaatagccagaaagaatcacattacgcacggtagtgctgacccggtaatccagatgcaaactactgctgacgtaaccgatatgctttttgatatcccagatggtttcgccgctgccgcgacgtcgtccgaaaagcgtcaaatcgttgctgtaaccttgcggatgatcgccagtaaccaggcttaataacgtgctttttcctgcaccatttggcccgacaatttgccagtgttcgcctggattcacctgccagctaaggttattaagaatggggcgatcgttataagaaaccacgccattgttcagcacaatgcgcggttcgttggcgggtaaggcgtgacgtgcactaggttcatccggctccggcagttgcacaccttcaagctgttcactatgcgccagttgcgcgacgagtgcttgttggagcagttcctctttagcgccagtttccgctaacgtgcaatccgccagcacgccagcaaactggacaaactccgggatctcatcgaagcgattgagcaccagtaccagagtaataccggactgatgtaagctggcgagtcgctcagccagctgctgacgactggcaacatccaggccatcgaacggctcatcaagaatcaacaagtcaggctcgctcatcagcgcctgacacagcagggtttttcgcgtctcgccagtggaaaggtatttaaagcgtcggtcgaggagggcggtaataccgaactgctgcgccagttgcatgcaacgcggtgcatcctttacttcatcctgaatgatctcagccgtagtgcgtccggtgtcatcttcgccagggccgagcatatcggtgttattccgctgccattcgtcgctgacgagtttttgcaattgctcgaaggagagacgagtgatgtgggaaaactggctttgccgttcacctttcaaaagcggaagttcccccgccagcgcgcgggccagggcgcttttcccgcttccattgctaccgacaaacgcccaactatcacccgcgtttaacgttagctgaggcaattgcagcgtttttgtgtcgctaagacgaaacgtgccttgcaaaatttgcaagctactcattttatatcccactttgtgcagcgattactgacagggatacgtgtttcataacaaattgtcaacacgcttagcacagcgtggcgataatcacgctgtcggcattaaagtaggccgtgacattctgtccttgctgaagagaagtcgcttcatttaccggcactgtggcgcacagtgtttgcccgtcgggtagcgccattaatacttcgcactgctctgcgccgcgctcaatatgactaataatacccggtaattggttgtcagcgttttgcgcgaccgcctcgtcctgagtaatacctacccacggcgcttttagcaatatcaacacttctttgccttcatccagccccagacgcgcgccgctttgtgcggtaattgcgactttcaggcgtgtttttccgtcagccagtaagacatcaacatgctgttgaacgtcatcatgatcgcgggcggtgatggtaccgaaccactggttacgggcgctggtttgcagactaaaacgactgatcgcggccagcaggctgttcagcggcagggcgtcatcgtcacttaacacatcaaaggctttttgctggatttgcgccagtaagtcatagagctgaatcagtcgctgaccatagcgggtcagtactgcgccgccgccacctttaccgcctgttgcgcgctcgaccagaatatgctcacttaactgattcatctcgttaatggcatcccaggcgcttttatagctaataccggcatctttcgctccctggctaatggaaccggaaagcgcaatgtgttttagtaggctaatgcggcgcgggtcggcgaataatttttgttggagcttaagggtgagaaggatttcggcctgcataacaatgtcctggcaaaagtcttattgtgacggaaaacgaacgccacgcaaagctgaccgcacaaaaggggagtgcttttctgtgcttagcggttagaatagtctcatgactatatctggagttgaccatgttagagttattaaaaagtctggtattcgccgtaatcatggtacctgtcgtgatggccatcatcctgggtctgatttacggtcttggtgaagtattcaacatcttttctggtgttggtaaaaaagaccagcccggacaaaatcattgattccctgaatgcccgcttagtcgggcattttctttttctcaacttcctgcttttcctgccgatattttttcttatctacctcacaaaggttagcaataactgctgggaaaattccgagttagtcgttatattgtcgcctacataacgttacattaaggggttaccaatggctcgtaaatggttgaacttgtttgccggggcggcactctctttcgctgttgctggcaatgcactggcagatgaagggaaaatcacggtgttcgccgccgcaagtctgactaacgcaatgcaggacattgctacgcagtttaaaaaagagaaaggcgtggatgtggtttcttctttcgctagcagttctactctcgcccgtcagattgaagcgggtgcgcctgcggatctgtttatttctgccgatcagaaatggatggattatgcggttgataaaaaagcgatcgatacagctacgcgtcagacactgctcggcaatagcctggtcgttgtagcaccgaaagccagcgtgcagaaagatttcaccatcgacagcaaaaccaactggactagtctgctgaatggcggtcgcctggcggttggcgatccggaacatgttcccgctggcatttatgcaaaagaagcactgcaaaaactgggcgcatgggatacgctctctccgaaactggccccagcggaagatgttcgtggggcgctggcgctggtcgaacgtaacgaagcgcctctgggcattgtctacggttctgacgcagttgccagcaaaggggtaaaagtggttgccaccttcccggaagatagtcataaaaaagtggaatatccggttgctgttgtggaagggcataacaatgcgacagtgaaagcattttatgattatctgaagggaccgcaggcagcggaaatctttaaacgttacggatttacaatcaagtaatgatactgaccgatccagaatggcaggcagttttattaagcctgaaagtttcttccctggctgtgctgtttagcctgccgtttgggatcttttttgcctggttactggtgcgttgcacgtttccgggcaaagctctgctcgacagcgtactgcatctaccgctggtgttaccgcccgtggtcgtcggttacttattattagttagcatgggacggcgcggatttatcggtgaacgtctgtatgactggtttggtattaccttcgcctttagctggcgcggcgcggttctcgctgccgccgtcatgagctttccgctgatggtgcgggcaattcgtctggcgctggaaggggttgatgtcaaactggaacaggccgcaagaacactgggggccgggcgctggcgcgttttctttactatcacgttaccgctgaccttaccgggaattattgttggtacggtactggcttttgctcgttctctcggtgagtttggtgcaaccatcacctttgtgagcaacattcctggtgaaacgcgaaccattccttctgccatgtataccctgatccagacccccggcggggaaagtggagcggcgagactgtgcattatttctattgcgctggcgatgatctccctgttgattagtgaatggctggccagaatcagccgtgaacgggcggggcgctaatcatgctggaactgaatttttcccagacgttgggcaaccattgcctgactattaatgaaacgctgcccgccaatggcatcactgctatctttggcgtctccggtgccggaaaaactagcctgattaacgccatcagtggactgacgcgcccgcaaaaagggcggattgtcctcaatgggcgggtactaaatgatgccgaaaaaggtatctgcctgacgccggaaaagcgtcgcgttggctatgtttttcaggatgcgcggctgttcccgcattacaaagtgcgtggcaatctgcgctacggcatgagcaaaagtatggtcgatcagttcgataagctggtggcgcttttaggcattgaaccgttgcttgaccgtttaccaggcagcctgtccggaggcgaaaaacagcgcgtggcgattggtcgggctttgctgacagcaccggaattgctgttgctggatgaaccgctggcgagtctggatattccgcgtaaacgcgaactgttgccttatctgcaacggctgacacgggaaatcaacattccgatgttgtatgtcagccatagcctggatgagatcctccatctggcagacagagtgatggtactggaaaacggtcaggtgaaagcctttggcgcgctggaggaagtgtggggcagtagcgtgatgaatccgtggctgccgaaagagcaacaaagtagcattctgaaagtgacggtgcttgagcatcatccgcattacgcgatgaccgcgctggcgctgggcgatcagcatttgtgggtcaataagctggacgaaccgctgcaagctgcgctacgtatccgcattcaggcttccgatgtttctctggttttacaaccgccgcagcaaaccagcattcgtaacgtattgcgggcaaaagttgttaatagttatgacgacaacggccaggtggaagtggaactggaagtcggcggtaaaacgctgtgggcgcgtatcagcccgtgggccagggatgaactggcgatcaaacctggcctgtggctgtacgcgcaaattaaaagtgtgagcataaccgcctgattaaatcaggtggctataaatgaactgggcaatgctgtcggtggtgttatcaccaatcacaatgttggcgcgcgcttttaccgcgtcatcggcgttgcccatcgccacgcctgtaccagcggcttccagcatactgatatcattaaagttatcgccgaatgccacgacgttttccatgctccaaccttgcgcctcaacccatttcgtcaaacgtttacctttgctgttgccgccgcgtgcaatatcaacctgatcgtgccaggaccattcacactccagtcccagttcatgttcgacatgcttaccaaaatgctgcaattgcggcaggtcatcgtgcgtcagggcgaacttccatacggcgttaacttgttgcgccgtttcagccagagaagcgacttgtgtgaaagtcggacgctgttccggcggcagggtttgcgcccagttagatgtgcgaatgacatgcccggtcgggtgctcatagaccattgcatcatcgacatacatcagaccgtgaatgtggtgttcattcagcatctcaatgagttgcagggctttaataacgggcattgggtccgcttccagcacggtttttgcatgataatcatacaaataggtgccattacagcaaatagcaggtgtatccagcgccagcgcctgataaaaaggatgaatagcgacgtgatggcgacctgtgacgatgattaattgatagcctgcttcgcgagcgcgggccagggcttctatgctactaggaagcagggtctttttcggggtcaataaggtgccgtctaagtcgagagcaatcacgcgtgtggtcatggcgtattccagattaaggttaagaattttcgtctgcgcgaatggtacaccgataccactatcggacaaaattctgcgttttaattcagcattcaccgccaaaagcgactaattttagctgttacagtcagttgctaaatgcaaaggagcattcatgaagcaaacagtttatatcgccagccctgagagccagcaaattcacgtctggaatctgaatcatgaaggcgcactgacgctgacacaggttgtcgatgtgccggggcaggtgcagccgatggtggtcagcccggacaaacgttatctctatgttggtgttcgccctgagtttcgcgtcctggcgtatcgtatcgccccggacgatggcgcactgacctttgccgcagagtctgcgctgccgggtagtccgacgcatatttccaccgatcaccaggggcagtttgtctttgtaggttcttacaatgcgggtaacgtgagcgtaacgcgtctggaagatggcctgccagtgggcgtcgtcgatgtggtcgaggggctggacggttgccattccgccaatatcagtccggacaaccgtacgctgtgggttccggcattaaagcaggatcgcatttgcctgtttacggtcagcgatgatggtcatctcgtggcgcaggaccctgcggaagtgaccaccgttgaaggggccggcccgcgtcatatggtattccatccaaacgaacaatatgcgtattgcgtcaatgagttaaacagcagtgtggatgtctgggaactgaaagatccgcacggtaatatcgaatgtgtccagacgctggatatgatgccggaaaacttctccgacacccgttgggcggctgatattcatatcaccccggatggtcgccatttatacgcctgcgaccgtaccgccagcctgattaccgttttcagcgttagcgaagatggcagcgtgttgagtaaagaaggcttccagccaacggaaacccagccgcgcggcttcaatgttgatcacagcggcaagtatctgattgccgccgggcaaaaatctcaccacatcagcgtatacgaaattgttggcgagcaggggctactgcatgaaaaaggccgctatgcggtcgggcagggaccaatgtgggtggtggttaacgcacactaaccgctgatttacccggcgcagtctctcctgcgccggtgtattaacctatctcctgtaacgcgtgtctctggcgttcgacgatattggtccacaaattgtctttatcgtcagtccataaattaatcagcaaggcaaaaaagcgttctgctgctggagaaagtacggcatctttacggcgaattattcccaatgttcgacgtataacgggttccaccaatgggataccaataatgctagaatagggcgcatgaggcattgccaggccaggaagcgcgctaatccccagtcccgcctccaccagtcctaaactcgtgctaagatgacgcacttcgtaaaaccagtccagcttccagggcttgtcggccagctgttgttctatcaacagtcggttgccgctggaggagcgtacgccaatcattttgtaacccactaactcctgccattctacaagctgctttttggccaatggatggtcacgccgacaggccagcacgaacggctcgttgaccagtggggtaaaatcaatggaactatttgtgacgttgttcatgtttatgccaaagtcactttcgttacacagcacgctttccatgcaattattcgtgccttgttccagaatccgcactttaatattgggatacagctcattaaatttaccgattgccagcggtaaaaaataaaatactgcggtcggaatacacgctaacgtcaccataccacgatgataagcattcatatcacgaatattaaaaagcgtttcatcgaatttctttattaattcccgcgcctccgggagcaacctttttcctgcttttgttaacgtaaccttgcgagttgtacgctcaaatagttgaacatgtaaatcttcctccatcttttttattcttcgcgttaatgcaggttgcgtaatattgagtaatttagcggcattgttaaagctactggactctgccagtatgacaaatgccttcatactacttaattcatgcttcattattactccggaaaatggaaggctgctttttgggtggctggccgttaaaaattttaactgcatttagccaacttaaattaatgaaaaaatgttattaatcgttgagctaaagtcattagagatgctttgcccttaatgtaaccatatcgcaataagttatgtttttaaattgagggcattattatgaaaaaaataccctgcgtgatgatgcgaggtggaaccagcaggggcgcgttcctgttagcggaacatttacccgaagatcaaacgcagcgcgataaaatattgatggcaattatgggttccggtaacgatctggaaattgacggtattggcggcggtaatccactgaccagtaaagtcgccattattagccgttccagcgatccgcgtgctgatgtcgattatctgtttgcgcaggtaatcgttcatgagcaacgtgtcgataccacgcctaactgcggcaatatgctgtctggtgttggggcattcgccattgaaaatggtttgattgcagcgactagcccagttactcgcgtacgtatccgcaacgtcaatacgggtacgttcatcgaagctgatgtgcaaacgccaaatggtgttgtcgagtacgagggtagcgccagaattgacggcgtaccgggtactgccgcaccggttgcgctcactttcctgaatgccgctggaaccaaaaccggaaaagttttcccgactgataatcagattgattattttgacgatgtcccggtgacctgtatcgatatggcgatgccagtcgtcattattccggctgaatatctgggaaaaacaggttatgaattaccggcggaactggatgccgacaaagcattattagcccgcattgaatctatccgtctacaagcgggtaaagcaatgggcttaggtgatgtcagtaatatggttatccctaaacctgtgcttatttctccagcgcagaaaggcggggcaattaatgtgcgttattttatgccgcattcttgccatcgcgcgctggcgataaccggtgctattgctatttccagtagttgtgcattggaaggcaccgtcacccgacaaatcgtcccttctgtaggatacggcaatatcaatattgaacaccccagtggtgcgctcgacgttcatttaagtaatgaaggtcaggatgccacgacgttacgcgcatctgttattcggacgaccagaaaaatattttccggtgaagtttatcttccctgaaaaaattcgttgtcaggataaggacaatcaataaaggacttctgtatgagtcatacagaaagaacaggattttaaatgaataagaaaagcttatggaagctaattctgatattagcgatcccatgtattattggttttatgccagctccggcaggattaagcgaactggcgtgggtgctttttggtatttacctggcggccattgtggggctggttatcaagcctttcccggaacctgtcgtactgttaattgccgttgctgccagtatggtggtggtcggtaacttatccgacggtgcgtttaaaaccaccgccgtattaagcggttactctagtggtaccacctggctggtgttcagcgcgtttaccttaagcgccgcatttgtgaccaccggtttaggtaaacgtattgcctatctgctgattggtaaaatcggtaacaccacgctgggtctgggttacgttacggtattcctcgatctggtactggctccggcaacaccgtctaacaccgcgcgtgcgggcggcattgtgttaccgatcatcaacagcgtggcggtggctttggggtccgaaccggaaaaaagtccgcgtcgtgtcggacattacctgatgatgtccatttacatggtcaccaaaaccaccagctatatgttctttaccgcaatggcggggaacattctggcgctgaaaatgatcaacgacattctgcacctgcaaattagctggggtggatgggcgctggcagccggattgccgggcatcattatgctgctggtcaccccgctggtgatttacaccatgtatccaccagaaattaagaaggtggataacaaaaccatcgctaaagcgggccttgccgaactaggaccgatgaaaatccgcgaaaaaatgctgctcggtgtctttgtgctggcgctgctgggctggattttcagtaagtctctgggggttgatgaatccaccgtggcaatcgttgttatggcaaccatgctgctgctgggtatcgttacctgggaagacgtggttaaaaataaaggcggctggaataccttaatctggtacggcggtattatcggcttaagctccttattaagcaaagttaaattcttcgaatggttagctgaagtctttaaaaataacctggcatttgatggtcacggtaacgttgctttcttcgttattattttcctcagcattatcgtgcgttatttcttcgcttccggtagtgcctatatcgttgctatgttaccggtatttgccatgctggcgaacgtctccggcgcaccgttaatgttaaccgcgctggcactgttgttctccaactcctatggcggcatggttactcactatggcggcgcggcaggtccggtcatctttggcgtgggttataacgatattaaatcctggtggttggtcggtgcggtactgacgatattaaccttcctggtgcatatcaccctcggcgtgtggtggtggaatatgctgatcggctggaacatgctgtaaatattctcgtcatacttcaagttgcatgtgctgcgtctgcgttcgctcaccccagtcacttacttatgtaagctcctggggattcactcgcttgtcgccttcctgcaactcgaattatttagagtatatccatttattatctttctgcgcacttcacggtgcgcagatatctggagcatttgatgatcaagttatctgaaaaaggcgtgtttctcgccagtaataacgaaataattgccgaagaacatttcaccggcgaaattaaaaaagaagaagccaaaaaaggcactattgcctggtctattctctctagccataatacgtccggaaatatggataaacttaaaattaagtttgatagtttagcctctcacgatattacctttgttggtattgtacagaccgctaaagcgtccggtatggaacgtttcccgctgccgtatgtgctgaccaactgccataacagtctctgcgccgtcggcggcactattaacggtgatgaccatgtttttggtttaagcgcggcccagcgttatggcggtatttttgtgcctccgcatattgcggtcatccatcaatatatgcgtgagatgatggcaggcggcggcaaaatgatcctcgggagtgacagccacacccgttacggtgcattagggacaatggcagtcggtgagggcggcggtgagttggtaaaacagctgcttaatgacacctgggatatcgactatccgggcgtggttgcggtgcatctgaccggaaaacctgcgccgtatgtggggccacaggatgtggcgctggctatcattggcgcggtgttcaaaaacggttacgtcaaaaacaaagtcatggagttcgttggaccgggcgttagcgcgctctctaccgatttccgtaacagcgttgacgtgatgaccactgaaacgacctgtttaagttctgtctggcaaaccgatgaagaagtccataactggctggcgctgcacggtcgcggccaggattactgccagcttaaccctcaaccgatggcgtactacgatggctgcatcagcgttgatttaagcgccatcaaaccaatgattgcgctgccgttccacccgagcaacgtgtatgaaatcgacacactgaaccagaacctgaccgacattctgcgtgagattgaaattgagtccgaacgcgtggcgcacggtaaagccaaactcagcctgctggataaagtggaaaatggtcgcctgaaagtgcagcaggggattatcgcgggctgttctggcggtaactacgaaaacgtcatcgcggcggcgaatgcactgcgcggtcaatcctgtggcaatgacaccttcagcctggcagtttacccgagtagtcagccggtgtttatggatctcgccaaaaaaggtgtggtagcagatttgattggcgcaggcgcaatcatcagaaccgcgttctgcggcccatgctttggcgcgggcgatacgccaatcaacaacggtttgagtattcgccacaccacgcgtaacttcccgaaccgcgaaggctctaagccagctaatgggcagatgagtgcggtggcgttgatggacgctcgttctatcgctgcgactgcggcaaacggtggctatttaacctctgccagcgaacttgattgctgggacaacgtgccggagtacgccttcgatgtaacgccgtataaaaaccgtgtttatcagggctttgtgaaaggggcaactcagcaaccgctgatttacgggccgaacattaaagactggccggaattgggtgcgctgactgacaatatcgtcctgaaagtgtgcagcaagatcctcgacgaagtgaccaccaccgacgaactgattccttccggtgaaacctcttcttatcgtagtaatccgattggtctggcggagtttaccctgtctcgccgcgatcccggttatgttagcagaagtaaagcgactgctgagctggaaaatcagcgtctggcggggaatgtcagcgagctgacagaggtgtttgcgcgcattaagcagattgctggtcaggagcatattgatccgctgcaaactgaaattggcagcatggtctatgcggtgaaaccaggcgatggttctgcgcgtgaacaggcggcgagctgccagcgtgtgattggcggtctggcgaatattgccgaggagtacgcgactaaacgctatcgttctaacgtcatcaactgggggatgttaccgctgcaaatggcggaagtaccaacctttgaagtgggggattacatttacatccctggcattaaagcggcgctggataatccgggtacgacgtttaaaggttatgtgatccatgaagatgcgccggtaacggaaattacgctctatatggaaagtctgactgctgaagagcgcgagattatcaaggcgggtagtttgattaacttcaataaaaaccgtcagatgtaaaaagcgccatgtgaatgtaggtcgcattcggcacttattgtcggatgcgatgcttgcgcatcttatccgacctacgaatcgcatcgaatctgtaggccagataaggcattttcgcagcatccggcacttattgtcggatgcgatgcttgcgcatcttatccgacctacaaatcgcatcgaaccgtaggccggataaggcgtttacgccgcatccggcaaatagttaattgcccttacttcttcgcctctgcaaccactttactacccacgccgcggttattgtattcccacatgcggttgtagttagtgtcattcagattgcgctgtatttcgtcgttatcatctacgctgccggtattacccgcaaacggacgattagagatcaccgcatcggcccacggtttagccgtgttaaaaccttcgttgatggcgctatcacggatcaccacctgaccgttggtattggcatcaacatccaggctgcggcccagttgcgccacaccatcaccgaaagcattgaaacggctgtttacggcgaggaaaccgtagtaaatgttggacagcgtagccggtgcaaacacatacgcttcttgctgagtacgactgttcaccacgcggaattcggtgttatcgaacaccactgcgccgcgaccagaaacgatatccacatccccttcaatgtagctgttggtcaccagcgtacgcggctgacgattcgtttccagacggttctgcacaccgctgttggtgacaaagaaggtgttctgacgaccgagaatgttaacgttgttaatctgtacctggtcaccatcagtacgcagtgccaccgccggatggttacctgcatctacgctatcgcccagcgtgttttcgatggtcagattttgcagttgcaggccattgttttgactccagaagaccgcagagcagagaacaccgatactgtcgctgcgtttgctctggcagctatcgtacatataccacgctggtttacctggcatatatttgccgcgcgggttgacgtcgtgacgccagtcggcagggctcatgccaccatcaagggaaagcccaatcttcacatcaatcggtttttcacctgtaccgtacagagtaattccacccggagcggcagggacatataccgttccctgatactcaccaggcatcacggcaatatactggcgcttgttggtacgcttgataattgccgcatctaccgccgcctgaatcgtggtatgcgttacaccttgagtgcccgccgggccgacaacaaagtcaggttgcgcaggcagggtaatcggggaaggattccacgctgcagcacctggtgtcagggatgcaaaatagtgttgagcatcgaaattctgcgcttcttttgcgctcagaatcgggcgagaagaggtaccaggcgcggtttgatcagaaggacgttgatcgggcggggtactgctacaggcggtcagcgtcacgccaaaagccaatgccagcgccagacgggaaacactaaatgtgttcacaggttgctccgggctatgaaatagaaaaatgaatccgttgaagcctgcttttttatactaacttgagcgaaacgggaaggtaaaaagacaaaaagttgtttttaatacctttaagtgataccagatggcattgcgccatctggcagagtgattaactaaacatcgcagtaatgctggcgcttgccagagagtggaaatgaacgttaaacccgaccatcgcgccgctggcaccttcatcgacatcaatacgttctatatccagcgcgtgaacggtaaaaatgtagcgatgagtttcgcctttcggcggtgctgcgccatcgtacccggttttaccaaagtcggtacgcgtctgcaaaacgccgtctggcattgctaccagaccagagccaaacccttgcggtaatacgcgggtatcagcgggtaagttaacaactacccagtgccaccagccggagccggttggcgcatccgggtcgtagcaggtgacaacaaaacttttcgttcccgcaggaacatcatcccacgccagatgcggactaatattatcgccatcgtaacccatgccgttaaagacatgacgatgcggcaatttatcgccatcgcgcagatcgttactgatgagtttcatgaaccctcctttcttgtttgcagaaagtgtagccagaaaccctcacgcggacttctcgttattggcaaaaaaatgtttcatcctgtaccgcgcggttaaccgctgcggtcagacgctgcaactgttgcgggagaataatatagggcggcatcaggtaaatcagtttgccaaaaggccggatccagacaccctgttcgacaaagaatttttgcagcgccgccatattcaccggatgagtggtttcgaccacgccaatggcccccagtacgcgcacatcggcaaccatttcggcatcacgggcgggggcaagttgctcgcgcagctgtacttcaatatccgccacctgttgctgccagtcgccagattcgagaatcgccaggctggcgtttgctgccgcgcaggccagcggattgcccataaaagttggcccatgcataaagcaaccggcttcaccgttactgatggtttctgcaacctcgcgcgtggtgagtgtggcggaaagggtcattgtgccgccggttaaggctttaccgaggcacaaaatgtccggcgcgatttctgcatgttcacaggcaaacagtttcccggtacgaccaaatccagtggcgatctcgtcggcaatcagcaagataccttcgcgatcgcatattttgcggattcgttttaaccattccggatggtacatgcgcatcccgcctgcgccctggacaatcggctcaatgatcaccgccgcgatttcatgacgatgcgccgccatcaggcgggcaaagcccaccatatcgcgctcatcccattcgccatccatgcggctttgcggggcgggagcaaacaggttttctggcaggtagcctttccacagactgtgcatactgttatccggatcgcacacgctcatcgcgccaaaggtatcgccatgataaccattgcggaaggtcagaaaacgctggcgcgcttcgcctttggcttgccagtactgcaacgccattttcatcgccacttccaccgctacggaaccggagtccgcgagaaaaacgcactccagcggttgcggcgtcatcgccaccagtttgcggcacagctcaatggctggcgcatgggtgataccgccaaacatcacatggctcatggcatcaatttggctcttcatcgccgcattaagctgcgggtgattgtagccgtggatcgccgcccaccaggagctcataccgtcaaccaggcgtctgccgtcagacaaaatcagctcgcaaccttcggcgctcaccaccggataaaccggcagaggggaggtcatggatgtgtatgggtgccagatatggcgttggtcaaaggcaagatcgtccgttgtcataatcgacttgtaaaccaaattgaaaagatttaggtttacaagtctacaccgaattaacaacaaaaaacacgttttggagaagccccatggctcaccgcccacgctggacattgagccaagtcacagaattatttgaaaaaccgttgctggatctgctgtttgaagcgcagcaggtgcatcgccagcatttcgatcctcgtcaggtgcaggtcagcacgttgctgagcattaagaccggagcttgtccggaagattgcaaatactgcccgcaaagcagccgctacaaaaccgggctggaagccgagcggttgatggaagttgaacaggtgctggagagcgcgcgcaaagcgaaagcggcaggaagcacgcgcttctgtatgggcgcggcgtggaagaatccccacgaacgcgatatgccgtacctggaacaaatggtgcagggggtaaaagcgatggggctggaggcgtgtatgacgctgggcacgttgagtgaatctcaggcgcagcgcctcgcgaacgccgggctggattactacaaccacaacctggacaccagcccggagttttacggcaatatcatcaccacacgcacttatcaggaacgcctcgatacgctggaaaaagtgcgcgatgccgggatcaaagtctgttctggcggcattgtgggcttaggcgaaacggtaaaagatcgcgccggattattgctgcaactggcaaacctgccgacgccgccggaaagcgtgccaatcaacatgctggtgaaggtgaaaggcacgccgcttgccgataacgatgatgtcgatgcctttgattttattcgcaccattgcggtcgcgcggatcatgatgccaacctcttacgtgcgcctttctgccggacgcgagcagatgaacgaacagactcaggcgatgtgctttatggcaggcgcaaacagcattttctacggttgcaaactgctgaccacgccgaatccggaagaagataaagacctgcaactgttccgcaaactggggctaaatccgcagcaaactgccgtgctggcaggggataacgaacaacagcaacgtcttgaacaggcgctgatgaccccggacaccgacgaatattacaacgcggcagcattatgagctggcaggagaaaatcaacgcggcgctcgatgcgcggcgtgctgccgatgccctgcgtcgccgttatccggtggcgcaaggagccggacgctggctggtggcggatgatcgccagtatctgaacttttccagtaacgattatttaggtttaagccatcatccgcaaattatccgtgcctggcagcagggggcggagcaatttggcatcggtagcggcggctccggtcacgtcagcggttatagcgtggtgcatcaggcactggaagaagagctggccgagtggcttggctatagccgggcactgctgtttatctctggtttcgccgctaatcaggcagttattgccgcgatgatggcgaaagaggaccgtattgctgccgaccggcttagccatgccagtttgctggaagctgccagtttaagcccgagccagcttcgccgttttgctcataacgatgtcactcatttggcgcgattgcttgcttccccctgtccggggcagcaaatggtggtgacagaaggcgtgttcagcatggacggcgatagtgcgccactggcggaaatccagcaggtaacgcaacagcacaatggctggttgatggtcgatgatgcccacggcacgggcgttatcggggagcaggggcgcggcagctgctggctgcaaaaggtaaaaccagaattgctggtagtgacttttggcaaaggatttggcgtcagcggggcagcggtgctttgctccagtacggtggcggattatctgctgcaattcgcccgccaccttatctacagcaccagtatgccgcccgctcaggcgcaggcattacgtgcgagcctggcggtcattcgcagtgatgagggtgatgcacggcgcgaaaaactggcggcactcattacgcgttttcgtgccggagtacaggatttgccgtttacgcttgctgatagttgcagcgccatccagccattgattgtcggtgataacagccgtgcgttacaactggcagaaaaactgcgtcagcaaggctgctgggtcacggcgattcgcccgccaaccgtacccgctggtactgcgcgactgcgcttaacgctaaccgctgcgcatgaaatgcaggatatcgaccgtctgctggaggtgctgcatggcaacggttaataaacaagccattgcagcggcatttggtcgggcagccgcacactatgagcaacatgcagatctacagcgccagagtgctgacgccttactggcaatgcttccacagcgtaaatacacccacgtactggacgcgggttgtggacctggctggatgagccgccactggcgggaacgtcacgcgcaggtgacggccttagatctcagcccgccaatgcttgttcaggcacgccagaaggatgccgcagaccattatctggcgggagatatcgaatccctgccgttagcgactgcgacgttcgatcttgcatggagcaatctcgcagtgcagtggtgcggtaatttatccacggcactccgcgagctgtatcgggtggtgcgccccaaaggcgtggtcgcgtttaccacgctggtgcagggaagcttacccgaactgcatcaggcgtggcaggcggtggacgagcgtccgcatgctaatcgctttttaccgccagatgaaatcgaacagagcctgaacggcgtgcattatcaacatcatattcagcccatcacgctgtggtttgatgatgcgctcagtgccatgcgtagcctgaaaggcatcggtgccacgcatcttcatgaagggcgcgacccgcgaatattaacgcgtagccagttgcagcgattgcaactggcctggccgcaacagcaggggcgatatcctctgacgtatcatctttttttgggagtgattgctcgtgagtaaacgttattttgtcaccggaacggataccgaagtggggaaaactgtcgccagttgtgcacttttacaagccgcaaaggcagcaggctaccggacggcaggttataaaccggtcgcctctggcagcgaaaagaccccggaaggtttacgcaatagcgacgcgctggcgttacagcgcaacagcagcctgcagctggattacgcaacagtaaatccttacaccttcgcagaacccactagcccgcacatcatcagcgcgcaagagggcagaccgatagaaagtttggtaatgagcgccggattacgcgcgcttgaacaacaggctgactgggtgttagtggaaggtgctggcggctggtttacgccgctttctgacactttcacttttgcagattgggtaacacaggaacaactgccggtgatactggtagttggtgtgaaactcggctgtattaatcacgcgatgttgactgcacaggtaatacaacacgccggactgactctggcgggttgggtggcgaacgatgttacgcctccgggaaaacgtcacgctgaatatatgaccacgctcacccgcatgattcccgcgccgctgctgggagagatcccctggcttgcagaaaatccagaaaatgcggcaaccggaaagtacataaaccttgccttgttgtaaccattctgtatttggttaaattgcgagcgagatcgcgtcttcgattgactgcaatttaaccaattaaattctaaaataatcacgaaaaaaattttacttccgcctcatgcggcgaatgtgggaattgcccaggcggcgggggataggggctggagacagttatccactattcctgtggataaccatgtgtattagagttagaaaacacgaggcaagcgagagaatacgcggcttgcacgcgaattggcgttaaagacggctcaaagaaatatcttttattttttaactggttagataaatgcaatggcagtcactgaacaggcatctcttgccataaaactgtcatcactcatcttgacaaatgttaaaaaagccgttgctttggggataacccggtaaggccggagttttatctcgccacagagtaaattttgctcatgattgacagcggagtttacgctgtatcagaaatattatggtgatgaactgtttttttatccagtataatttgttggcataattaagtacgacgagtaaaattacatacctgcccgcccaactccttcaggtagcgactcatgagtaaaccgttcaaactgaattccgcttttaaaccttctggcgatcagccagaggcgattcgacgtctcgaagaggggctggaagatggcctggcgcaccagacgttacttggcgtgactggcagtgggaaaaccttcaccattgccaatgtcattgctgaccttcagcgcccaaccatggtacttgcgcccaacaaaacgctggcggcccagctgtatggcgaaatgaaagagttcttcccggaaaacgcggtggaatatttcgtttcctactacgactactatcagccggaagcctatgtaccgagttccgacactttcattgagaaagatgccagcgttaacgaacatattgagcagatgcgtttgtccgccaccaaagcgatgctggagcggcgtgatgtggttgtggtggcgtctgtttccgcgatttatggtctgggcgatcctgatttatatctcaagatgatgctccatctcacggtcggtatgattatcgatcagcgcgcgattctgcgccgactggcggagctgcaatacgctcgtaatgatcaagcattccagcgtggtactttccgcgttcgtggcgaggtgatagatatcttcccggcagaaagcgatgacattgcacttcgcgtggaactgtttgacgaggaagtggaacgattgagcttatttgacccgctgaccgggcagattgtttccactattccacgttttaccatctacccgaaaacgcactacgtcacaccgcgcgagcgcatcgtacaggcgatggaggagatcaaagaagagctggccgccagacgcaaagtgctgttggaaaacaacaaactgctggaagagcagcggctgacccagcgtacccagtttgatctggagatgatgaacgagctgggctactgtagcgggattgaaaactacagccgcttcctctccggtcgtggaccgggtgagccaccgccgacgctgtttgattacctgcctgccgatgggctgctggtcgtcgatgaatctcacgtcaccattccacaaattggcggcatgtatcgcggtgaccgggcgcgtaaagagacactggtggagtacggcttccgcctgccaagtgcgctggataaccgtccgcttaagtttgaagagttcgaagcattagcgccgcaaaccatctatgttagcgcgacgccgggtaattacgagctggaaaaatccggcggcgatgtggtggatcaggtggtgcgtccaaccggattgcttgacccgattatcgaagtgcggccggtggcgacacaggttgatgatcttcttagcgagattcgtcagcgagcggcaattaacgaacgcgtactggtcaccacactgaccaagcggatggcggaagatcttaccgaatatctcgaagaacatggcgagcgcgtgcgttatcttcacagtgatatcgacaccgtcgaacgtatggagattatccgcgacttgcgtctgggtgagttcgacgtgctggtagggatcaacttactgcgcgaaggtctggatatgccggaagtgagcctggtggcgatcctcgacgctgacaaagaaggcttcctgcgttccgaacgtagcttgatccagaccattggtcgtgcggcacgtaacgttaacggtaaagcgattctctacggcgataagatcaccccaagtatggcgaaagcgattggcgaaaccgaacgtcgccgtgagaaacagcagaagtacaacgaggaacacggaattacgccgcaaggcttgaacaagaaagtggtcgatatcctggcgctggggcagaacattgccaaaaccaaagcgaagggcagaggaaaaagccgcccgattgttgagccggataatgtgccgatggatatgagccctaaagcgttgcagcagaaaatccatgagctggaagggttgatgatgcaacacgcgcagaatctggagttcgaagaagcggcgcaaattcgtgaccagttgcatcagctgcgtgagctgtttatcgcggcaagctaacaggatagcgaagaagactgatgacaaacggaaaacagcctgatgcgctacgcttatcaggcctacattttctccgcaatatattgaatttgcgcggtttgtaggccggataaggcgttcacgccgcatccggcataaacaacgcgcactttgtcttcaataggaagccggaattttccttcggatttccgttaacctaaagcctgtaacgccttttccagcgcgttatgtaacaactggcggtcatgacgatacggaatatcgctggcctccagtacctcctggatcacaatccgctctttcaccgcgctgacatccacttttggcccgacgatgaccgcatcaatgacctttttaccaacatactgctccataattgccagcttgctttccagcttcaaattagccgcaggtaaactcaactcacgccccagattgccgatataaaccatcggcgctggcgtgcggcgtaatgcctgggcgatttccttcagcagcagaattggcatcaggctggtataaaaactgccaggcccaataatgatgagatccgcttcattgatagcgtgaaccgcctcacgcgttgcgggtacattaggcgttaacaataactcttgaatcggcgtagttaactggtcgatattgacctcgccgtaaacttcatgcccctgatcgtcaatcgccatcagatcaacaggatgctcactcattggaatcaaatgcgtatccactttcagcagattacgaattaaattgatggcttccagaggccgcacgctaaggtgatccagcgcctttaacatcaagtttccgagattatgaccggaaagttcgccattgccaccaaaacggtattcaaacatcgcggaggcgacgctcggttccgttatcagctggttgaggcagttgcgcatatcgccccaggcaatgccgccttcactacggcgaatacgccccgtgctgccaccattatcggtggtggtgacgatacccgttaaacgagaacccaaagagctaagactactgagaacgcgtcccagtccatgccctccgccgagagcaacgacacgatcaagatcagccagcgtacgattgcgcatatagtttcctggagtcagattatccgcgctacagtagcgcaaattgcggggaaacagcaattaacctgccaatattgaggatacaaactattttcttctacctctaaaggacgatgcacgctatgcctccctgatgatgtatatcaaagtaaaaccgccattttcccttattctgtagcgaaatagcacgatcatgacgctatatacatgattacatagcgaaagtgtggatggtaaaaatctcatttacacgctagtatcggcataaccactaaacactctagcctctgcacctgggtcaactgatacggtgctttggccgtgacaatgctcgtaaagattgccaccagggcgaaggaagaaatgacttcgcctcccgtatctggaaaggtgtacatggctagtcaactgactgatgcatttgcgcgtaagttttactacttgcgcctgagcattaccgatgtgtgtaactttcgttgcacctactgcctgccggatggctacaaaccgagcggcgtcaccaataaaggctttcttaccgtcgatgaaattcgccgggttacgcgcgccttcgccagactgggcaccgaaaaagtgcgcctgacaggaggagagccgtctttacgccgcgactttaccgatatcatcgccgctgtgcgggaaaacgacgctatccgccagattgcggtcacaaccaatggttaccgtctggaacgcgatgtggcgagctggcgcgatgcgggacttactggcattaacgtcagtgtcgacagtctggacgcccgccagtttcacgctattaccgggcaggataaattcaaccaggtcatggcagggattgatgctgcatttgaggccggttttgagaaggtcaaagtcaataccgtgctgatgcgtgatgttaatcatcaccagctcgacacctttctgaactggatccagcatcgccctatccagctgcgtttcatcgaactgatggaaacgggcgagggcagcgagctcttccgtaagcatcacatctctggtcaggttctgcgtgacgagctactgcgtcgcggctggatccaccaattacgtcaacgcagcgacggtcccgcgcaagtcttttgccatccagattacgccggagagattggccttatcatgccgtatgaaaaagacttctgcgccacttgcaaccgcctgcgcgtttcctccattggtaaactccatctctgcctgtttggtgaaggcggcgttaacctgcgcgatctgctggaagacgatacccagcaacaggcgctggaagcgcgtattagtgcggcgctgcgggagaagaaacagacccatttcctgcatcaaaacaacaccggtattacgcaaaacttaagctacattggcggctaaaacgtcaaaaggagagatcagatgagtcaggtaagcactgaatttatcccgacccgtattgctattcttacggtttctaatcgtcgcggtgaagaagacgatacctccggtcactatctgcgcgatagcgcgcaagaagcgggccatcacgttgtcgataaagccattgtgaaagaaaaccgctacgctattcgcgctcaggtatctgcgtggatcgccagcgacgatgtacaagtggtattgattacgggtggtactggcctgacggaaggtgatcaggctcccgaagcattgctgccgttgttcgaccgtgaagttgaaggttttggtgaagtgttccggatgttgagctttgaagagattggcacttccacgttgcaatctcgtgcggtagcgggcgtcgccaacaaaacgctgattttcgccatgccgggtagcaccaaagcgtgccgtaccgcatgggaaaatatcatcgcgccgcagctggatgcccgtacgcgtccgtgtaatttccatccacatttgaagaaataagtatgagccaactgacccatatcaacgccgctggcgaagcgcacatggtggatgtctccgccaaagcggaaaccgtgcgtgaagcgcgggcggaagcctttgtcaccatgcgcagcgagacgctggcgatgattattgatggtcgccaccacaaaggcgacgtatttgccactgcgcgtattgccggtattcaggcggcaaaacgcacctgggatctgatcccgctctgtcatccgctgatgctcagcaaagttgaagtcaatttacaggccgagccggagcacaatcgggtgcgtatagaaaccttatgccgcctgaccgggaaaaccggtgtcgaaatggaagcattaaccgcggcctccgtggcggcgctgaccatttatgacatgtgcaaagcggtgcaaaaagatatggtgattggtccggtacgtttgctggcgaagagcggcggcaagagcggtgactttaaggtggaagcggatgattaaagttctttttttcgcccaggtgcgcgagttggtgggaacagatgcaaccgaagtggctgcggatttcccaactgttgaagcgttacgccagcacatggctgcgcagagcgatcgctgggcgctggcgctggaagatggcaaattactggctgccgtcaaccagacgctggtgagttttgaccatccgctgactgacggcgacgaagtagctttcttcccgccggtaaccggaggttaagatggcagaaaccaaaattgttgttggtccgcagccgttcagcgtaggagaagagtacccgtggctggcggagcgtgacgaagacggtgcggtagtcacctttactggtaaggtgcgcaaccataacctgggcgacagcgtcaacgcattaaccctcgaacactatccggggatgactgaaaaagcactggcagaaattgttgatgaagcgcgtaaccgctggccgctggggcgcgtcactgtgattcaccgcatcggggaattatggccgggcgatgaaatcgtttttgtcggtgtcaccagtgcgcatcgcagcagtgcgtttgaagccgggcagtttattatggattatctcaaaacccgcgcaccgttctggaagcgcgaagccacgccggaaggcgaccgctgggttgaagctcgggagagcgatcagcaggcggcaaaacgctggtaattttttgttagccggataaggcaccgctgcgtccggcaatttcaccgctcagtacatacgtttacgctgcgtcgatgcacagcctcatcattttgcagtatccttaagatattccttatatcttcaggagatcgtcatggacagattcccacgttctgatagtatcgtacaaccccgggctggcttgcaaacttatatggctcaagtctatggctggatgaccgttggcttgttgctgaccgcatttgttgcctggtatgcggctaattccgcggccgtgatggagctgttgttcactaaccgtgtctttttaatcggtctgatcatcgcgcaattagcattggttattgtgttaagtgcgatgattcaaaagctgagcgcaggtgtaacgacgatgctctttatgctttatagcgcgctgacgggtcttacgctttccagtatattcattgtctataccgctgcttctatcgccagtactttcgtcgttactgccgggatgttcggcgcaatgagcctgtacggttacaccacgaagcgcgatttaagtggctttggcaatatgctgtttatggcgttaatcggcattgtgctggcaagcctggtcaacttctggttgaaaagcgaagcattgatgtgggcagttacctacatcggcgtgattgtctttgtcggattgacggcgtatgacacgcagaaactgaaaaatatgggtgagcagattgatacccgcgacacgagcaacctgcgcaaatattccattcttggcgcgttaaccttgtatctggacttcatcaacctgttcctgatgttgttgcggatcttcggcaaccgccgttaattctttttcaccatcactatcccggccatgtgtcgggatttttttcttactaaaaacgacacttaacaagtaccaggtataaaatatgccttatggacgagcggaagcgttttctgtatccataaatgcaaaagtattttgtatgcgtggttttaaatttattgatggtgaatattaatattttttctaaggataactaaaagaatggaaagttacagccaaaacagcaataaattagattttcagcacgaggccaggatattaaacggtatatggctcattaccgctttaggtttggtggcaaccgcaggactagcctggggagctaagtatatcgaaattacggcaaccaaatatgatagtccaccaatgtatgtcgccatagggttattattactttgtatgtatggcttaagtaaggatatcaacaagataaatgccgccatcgcgggcgtaatatatctgtttttactctctttggtggcgattgtcgttgcaagtttagttcctgtatatgccattatcatcgtgttcagcactgcgggcgcgatgtttttaatcagtatgctggccggtttattatttaatgttgatcctggttctcaccgttttatcattatgatgacgttgacagggttggccctggtaatcatcgtgaatgcggcattaatgagtgaacggcccatttggataataagttgcttaatgattgtgttatggagtggcattatcagccatggacgaaataagctccttgaattggcggggaaatgccatagtgaagagttgtggagtccggttcgttgcgcttttacaggtgcattaacactctattactattttatcggcttctttgggatacttgccgcgatagctataacgcttgtctggcaaaggcatacgcgtttttttcattaaccgtaaatgcacatactaaagaacttaactaaacttcacatcgccgcttcatttttcgcccgtagcttcttcgcctggctttccagcaacaggtaacagatcagcgccagcagcagtgggataaagtaatacagcacacggtaagcgagtagggcggcgataattgtacctttggaggtatgctccccagccagtagtgcgataaacaccgcttccagcacaccgatccccgccggaatatgcacgatgacgccagcaatactactaaccagtaacacgcccagtacaaagaaatagttcacgctttgaccaagtaacagccagataatcgcccccattaccatccagttaacgctggaaatcagcatctgagcgagggcgaatttccaactaggcagcaccagcttttgccctttgatggtcatatggcggtgcttcgcgaaagcgcaaaaccacaaataaaccgcgataatcatcagtaagccaatgccgagaatacgcagcgtagtttgatcgacataccagtgatccggcaactccaccacgcctgcggtaaagataatccctgccagtaaaatgtagcccagccagttggtggtaatactgaggctgaaaatccgcgtaatagtgctaccgggcaaccccagacgagagtacaaacgatagcgcataccaatgccgccgacccaggtactgagcgtcaggttgaaggcgtagcagataaagctcaccagcatcacctggcgcttcgccagtttgtgaccgcagtaaaagcgggcgagcaggtcatagcagccgtaaatcagatagctgacgaccaccagcccgaccgcactaagcagcgcaacgcgattgtagtcgcggatgaccttccagacctcttcccagtccacttttttggcgtagaccaccagcaacacaatcaccgcgataaaaaacagccaggtgaggatcttctttgctaagcgccagcgcgggtgacttttactcatcagggttttacccccgtgttttcagtttctacccgatcctgcgtttccattgtcggttgtgcgggcggatcaacctgcgccagacgtggcgtgtgtgccggaagccagccaaccagcgccgggaagtggcgtaaaaagtggaacgccagcacgcttttggtcaggttccaccaggtgcgtttgggcagcatggtttcatccacctgctgacaatctgcggcaataatgccgttcagattatcgcgcagcgtctggttaaaatgacgatcgtggatgatgacatttgcttcgagattcagactcaaactgagcggatcgagattactggaccctactgtcgcccagtgatcgtccatcaatgccactttgccgtggagcgggcggcggcggtactcaaaaacctgaacgccgcctttaaccagatagttatacagcaagcgcgcaccgactctgacaatcggcatatccggttcgccctgaatgatcagtttgatccgcaccccgcgccgtgccgctttacgcaaggcgtgtaaaaatcgatagccggggaagaagtaggcgttggcgataatcacttcccgccgcgcctgagtgagcattttcaaataatggcgttcaatatcatcgcgatgttcttcgttatcgcgccagaccagcaatacctgcgcttctcccggctggcggttctcttccgctttgtgatgacgtcgccaccagcgtcgtgccgcgctctgtccaggcaggttttccagctcaaactggagaatatcttcgacaatcggcccttcaaggcgtaccgcgtaatcctgtttagcctctggaccgtagctggacatatgctcggcggagtaattcagcccgccaataaaggctatacgcgcgtcgatcaccacaattttgcgatgcatccggcgaaacacattggtgcgcataccaaaaaggcgagggcggggatcgtagtagcggaacactacgccagctgccgtcagttcattgacaaactcatcgctgagatccgggctaccgtagccatccagcaagacttccgctttaaccccgcgttgcgctgctgccagtagtgccgcatgcagttgtttgccgacgtcatcctcaaaccagataaacgtttcaagaatgatgcgttcttgtgcctcgccaatcgccttaaacaccgcgggataatattgctcgccgttttccagcaactggatcttattgccttcgcgccagctacatttcataaatgaatctccgcacttaaaggggcatgatcagaaaggtgtcgccatgtccgcagcggcaacgcggttggcgcgctggcgctggcatttttgacgtagatcctgtccagtcgtagtagaggaaattgcaccggaaacgtgcgcgccgggcgtccgtgggcgcgggtaaaaatctcatccagtccggcctgcacttttaacggatgattagctttttgccgccagtcattgaaatcacccgccaccaataccggttcgccgtccggtagctcattcacccattcggcgagcatcgcaagctgcgcctgacggtgcgcctcacgcaggcccagatgtacgcacatcacatgaatcgcttttccggtcatcggcggcacaatgcggcagtagagcacgccgcgcttttccgcaccatcgacgctaacatcgcgattctcataatgttcaatgggataacggctcagtacggcgttgccgtgatgcccttccgggtatacggcattgcgaccgtaggcaaaatcgctccacatagtgtcggcgagaaactcgtagtggctggtatcgggccagttttccacatgcagcggatgaacttcgtgcgcgcccatcacttcctgcaggcaaacaatatcggcgctgacggtacgcacggcgtcgcgaagttccggcaaaatgaagcgtcggttaaacgcggtaaagcctttgtgaatattgatggtgagcaccttgaagctaaattgttgtgtttgatcgggcataattttcctgtctttgcctcttatctcattgaaatagtgtagtcggcgtcacaaaaaggtgcggtcttacggaattttccgtaaagttcggtactctgagtaagtagagataaattcttcaggagagaagccatgaagtggcaacaacgtgttcgtgtcgcaacgggtctaagttgctggcagattatgttgcatttactggtagtggcgctgctggtggtgggctggatgagtaagactctggttcacgtcggcgtgggattatgcgcactgtattgtgtcacggtagtgatgatgctggtgtttcagcgccaccccgagcaacgctggcgtgaggtggcagacgtgctggaagagctgaccacgacctggtattttggcgcagcgctgattgtgctgtggctgttgtcccgcgttctggaaaacaactttttgctggcaattgcagggctggcaatccttgccggcccggcggtagtgtctttgctggcgaaagataagaagttacatcaccttacgtctaaacatcgcgtacgccgctgattacatcaccttacgtctaaacatcgcgtacgccgcactccctgtcgtggccgttatcaccagtagcggccacaaactattccacacaatatccagactcgcatccttcaaataaatctgcttggtaatgtccgtaaagtggcgaatagggttaatccacgtcaggttttgcagccataccggcatgttttccaccggagaaacgtaaccggaaaggagaatggcgggcatcataaagacaaacacgccgataaacgcctgctgttgtgtactacagagactactaatcaacagaccgaatcccaccaggcttaaaccataaatcaccatcgtaaagtagaacagcgccaggcttccggcgaaggggatttgatacgcccagataccaatcgccagcacaatggtggcctggaaggtggcgacaattaacgccggtacggctttgccgatgaagatctgccaggtggtgagcgggctaaccagtagctgatcgagcgtaccttgttcacgttcgcgggcgacggaaagactagtgacgatcattacgccgatagtggtgatcatggcgatcagactcggcaccacaaaccatttgtagtcgagattcgggttataccagttgcgtaccaccagctcgctgttgttaggtttcggttttccttccagcagctcctgctgataatttttgacgatctgttgcaggtagttggcggcaatttgcgcactgttggagttacgcccgtcgaggatcaactgcaaaggcgcggtctggaaggtatccagtttgcggctgaagtcagccgggaaacgcaccagtagtaacgccttttgtgtgtcgatggttgggcggatctcctgtgggcttttcagcagcagcacatgagtaaaggcgctggcgcgggcaaaacgttgggtcagctccacgctatgctcgccgttatcttcatcgtagatggcgatggtggcgttagtcacttccagcgtggcggcgaacgggaacaggatcacctgaattagcacgggtaaaatcagaatcgcgcgggtttgcggttcgcgcagcaagctctgcaactctttgcggattaacgtccataagcgatgaaacatgctcttctccttaatccagccgacgtttggttttcagccacgtcaggccgataaacatcaccgcgctagcgatcaaaaacagcacgtttaccaccagcaccactggaatattcccggcgaggaacaggctttgcagggtgctgacgaaataacgagcgggaataatgtacgtcaccgcgcggatcaccgcgggcatactgtcgatctgaaaaataaagccggaaagcataatgctcggcagaaaagcggcgttcagggcgacctgagcggcattgaactggttgcgggtaatcgtggaaatcagcagccccatccccagggtactgagtaaaaacaggctggagataaaaaacagaatcagcaggctcccgcgatacggcacgccgagaataaacacactcaccagcatacacagcaacatcgccagcatcccgagaaagtaataagggatcagcttacacagcagcagttccgtgcgggtaatctccgtagagagcagagcctccatggtgccgcgttcccattctcgcgccaccaccaggctggtgagaatcgcgccgatgaccgtcatgataatggtcaccgcaccggggataatgaagtgctggctaatcgccgccgggttaaaccagtagcgggtttgtacatcaataagcggttcaaaagtctgcccgttgtcctccgctcgctgcatttgccagatctgccagatcccttcgacatacccctgtacaaagttagcggtattcggctcactgccgtcggtgatcacctgaatcggtgcggtggcgttggcgcgctccatctgttccgcaaaatccaccggaataaccaccagaccgcgaattttccccgcctgcattttggcgatcagttcctgacggttatcgctgatggtggcgtcgatgtaggggctaccggtcatggtgtgggtgaaatccagcgccgcttcgctacgctgttccagtaaaatcccgacccgcagcttgctggagtcgaggttaatgccgtaaccaaaaataaacagcagtagcagcgggatcactaccgcaatcagccagctactcggatcgcgaacgatctgccgcgtctctttaacgcacagcgcccgtacgcgacgccaggacaggatcgggttactcattgctatgctccttatcccagtcgtggatcaactgaataaaggcttgctccatggtgggatcgggttgctcatcgttagcgctctgtgctttcaaatcgtccggcgtgccgctggcgattaatttcccgcggtacaccaggccgatgcggtcgcaatattccgcttcatccataaagtgggtggtgaccatcaccgtgacgcctttctctaccatgctgttgatgtgcagccaaaattcacggcgggtgagggggtcaacgccggaagtcggttcgtcgagaaacagaatgtccggttcatgcatcaggctacaggccagcgccagccgctgtttaaaacctaatggcagttcatcggtggcgtgggaggcgatacttttcaggccgaacgcctcgctcatgcgggagattttttcgttctgcgcccgaccgcgtaagccatacacaccagagaaaaagcgtaaattctgttcgaccgtcaggttaccgtagaggctaaatttttgcgccatatagccgagatgctggcgcgctttaccggaactctctttcagatccatccccagcaccagcgcctggccggaagtcggcaccagcaaaccgcacatcatcttaaaggtggtgcttttacccgcgccgtttggccccagcaaaccaaaaatctccccacgtttaacggcaaagttgacgtgatcggtggcggcaaaatccccaaatttcttggtcagttctttcgcttcgatcaccgtctcgccgggtgtgccttctaccgtatgtaatattgcgcccagcgggctttcgctggttccggcaccgcccagcaaatcaataaacgcatcttcaaaacgcggcgtagtttcgttgatgttgatttccggcatcccgtcggcatggcgaatatcgtctggtgtggcctcttttttgaggatcagacgtacgcttttcccctgaatcatgccgtcgctgacctgcggcagtttcaaggcgcgttgcaacagtttgcggttgccctcgtgtggactggtcatcagaaagctgcgtccggccatggtttgtgtcagggcttttggttctccctgatacagcaactcgccttcgttcatcagtaacacgtcacggcactgctcggcttcgtcgagatagctggtactccagaggattaacatcccttcgcccgccagctcatgcaccatctgccacagttcgcgccgactgatagggtcaacgccgacgccgggttcatcgagcagcaacactttcggttcgcccaccagggtacaggccagaccgagtttttgtttcatcccaccggagagcttgcccgccaggcgtccggtaaacggcccaagagacgtaaactccagcaggcgagcaaaagtttgcttacgtgcctcgccggtgacgctgcgcaaatccgcgtacagattgaggttctccatcaccgtgagatcttcatacagaccaaatttctgcggcatataaccgagcacggcgtgcagcgcgccgtcgtttttgatcggatcaaagccaatcaccgtggcactgccgctgtcgggtttcagtaatcccgccaacatccgcatcagcgtggttttacctgcaccgtccggccccaccaaccccgtcacataaccggcgtgaatggtacaatcgagcggcgcgacggcgggcttgtccatgcccggaaagcgtttttccaggccgttcagcgtgataacggcatcattcatgtcctgcctcgtcaccgaattgtaccgtcactggcattccctggcgtaacgcatcatcggcgtcggtcaccacaatacgcaggcgatagacgaggtcggtacgcagatccggcgtttcgacggttttcggggtaaattcagcagtcgggctaacgaaaccaatctgcccgtgatacggcttgtccgggcgaccatcggtataaagcagcactttgcgccccggctgggcctggtcaagattacgttcatcaacataagcgcgcacccacaccggacgcgttagactaacggtaaacaccgtgccaccttcattgaggaccgtgcctggctccaccgcgcgcgttaacagcgtgccatcagacggggctatcaacgtactgtcctgtaaattcaactccgcctgcgccagttgcgcctgcgcctgttcgaggctggctttcgcctgagcgatgtcctgttcacggttaccggaacggtactgacgcaatttatcctgtgcacttttcagcgttgcctgcgcctggtcgcggctggagcgggcattttccaggtcatttgcgctaatagtgcggcttttccacaacccttgctggcggttatagaagttctgcgcatagtcataggcggcttgcgcctgtttcaccgctgcggcggcctgagcgatttcttcattgcgatacccggcaagcatcaggtcatactgcgcctgtgccacgctaacacccgctttcgcctgcatcagggcaatctcatacggcttgtgatccagttcgcccagcacctggcccgctttgatagcatcaccttcgtccaccgccaggctttcaacgcgccccccaacacggaaactaagatttaccgtacgaatatccacgttgccatacagcgtcaggccgttatcctggcggctttgataccaccagtagcctccggcaaccacggcggcaagtaccactaccgccaatccgatcacgacaggttttttcatcactacaaactcctttgcgataattacaaactcctttggcttaatccttgcaaaatcaggtcgatatgacaggtcaccgtctggttgatcagttcggtcttttcttcatcgaacgcggtccagccggtacgtaacagaattgtttctttgccaagacggaacgccagaatctcaccaatcaacgcatgggtatgaaggatcatgcgggtgtcattggcgtcgcagccggtccaggcggcaatcaggcgtgtcaggtggctgtgtagcggactaatcacctgttcgtgcaccaggtggtaggctgccgtgggagagagctgctcacgggagataaacttgctgaggttgacggtgtcatcctgggtgagcagcttaatcatgttcctgcaggcgcgaaggatcagttcacggatggcagcccgatcaggctgtggttgcgcgaacaagcgttcggcttcctcggcatgcggacggaactgctcgccaataaaatcggcaatccactgggcgcaggcgaggtacaaatcttctttgctaccgaagtagtaggtgatggcagcgatattctgcccggcctgggcggctatctcgcgagtggtggcgttcattccatattcaccaaactgcgccagtgcggcagcaatcagctgttttttcgcctgttcacccttgattgtcatggcaggattattcatcgcacagtccattcttaatcaaatgattgattaagattatgactccataggggagttgtccagtatggctaagaattttagcaacgccagtcacagggataatttatgcgctgcgtcacaaaaactgctacactccgctccctcatgacattgtggtttttgtcattttccttttcagtatctccctgaaaactacaccggtaacggtcggggcggttcggagtagttatgtctttcgattctttgggtttaagccctgatatcctgcgcgccgttgccgagcagggttaccgtgaacccacccctattcagcagcaggcgatccctgcggtgctggaaggccgcgacctgatggctagcgcccagaccggcaccggcaaaacagcgggctttacgctgccgctgttgcaacacctgatcactcgccagccgcacgccaaagggcgtcgtccggtacgtgcgctcattcttaccccgacccgtgaactggcggcgcagattggcgaaaacgtccgtgattacagcaaatacctgaacattcgtagcctggtggtgtttggtggtgtgagtattaacccgcagatgatgaaactgcgtggcggcgttgatgtgctggtggcaaccccgggacgtttgctggacctggaacatcagaatgcagtgaagctggatcaggttgaaatcctcgtcctcgatgaagctgaccgcatgctcgacatgggctttatccacgatatccgtcgcgtgttaacaaaactacctgcgaagcgccagaacctgttattctccgcgaccttctctgacgatattaaagccctggcggaaaaactgttgcacaacccgctggaaatcgaagtggcacgccgcaataccgcgtctgatcaggtgacccagcacgttcactttgtcgataagaaacgcaaacgcgaattgctgagccacatgattgggaaagggaactggcagcaggtgctggtgtttacccgtaccaaacacggcgctaaccatctggctgaacagctcaataaagatggcatccgtagtgcggcgatccacggcaataaaagccaaggtgcgcgtactcgtgcgctggctgattttaaaagcggcgatattcgtgtactggtggcaactgacatcgctgcgcgcggcctggatattgaagagctgccgcacgtcgtcaactatgaactgccaaacgtacctgaagattatgtccaccgtatcgggcgtaccggtcgtgcggctgctaccggtgaagcgttgagcctggtgtgtgttgatgaacacaaactgctgcgtgatatcgaaaaactgctgaaaaaagagatcccgcgcattgcgattccgggctatgagccggacccgagtatcaaagccgaaccgatccagaacggtcgccagcaacgtggcggcggcggtcgtgggcaaggtggtggtcgcggtcaacagcaaccacgccgtggggaaggtggcgcaaaatctgcaagcgcgaaacctgcagaaaaaccgtctcgccgcctcggcgatgccaaaccggcaggcgaacaacaacgtcgccgccgtccgcgtaaacctgccgctgcgcagtaatcttttatgccgggctatgcccggcatcaggctgatgaacaaacgcaaaactgcctgatgcgctacgcttatcaggcctacgtgaactctgcaatatattgaatttgcatgcttttgtaggccggataaggcgtttacgccgcatccggcatttcacaacaagcacttgtcagcaatttgagaacacgggaaaaaatttatctgttttaccgcccataagccaccgagacgttacttctctatagccaattgttcgcgcaactccattaaaaggtagcccagtcgattcttgcccttaccatgaccaccgtctccccagtaagcatcgttttccgtatgctcaaccagttttgcgggcgcggttgccagcaagagcgcacgcagttctgcatgctgttcgaatttagcgcgaagtgcttttcgcatcacctgttctttgacgctctcccagtttttacgcagaggcttagaacgatcgcgccccatgcgtgcggcgaccataggggaagaaacccgacggatctcttcgcggtatttttcatcaaggaatttttgtgcctgaaaatagtgttcactggtaggccaggttttcccgtcaaccttgatgggccaggcggcaaagttagaaaaatcaccgtagtcatcgctggtgctgtagaaatttatgatggtgtcttgcatgacgtgttggatcctttgtgctcgaacgggcattaaaccgcattatgttggtggttattgcgagccgctttccagaaacagaaaaaccattacccctgaaaaccgaaaaatgccacaatattggctgtttatacagtatttcaggttttctcatggcattaaccgccgcgcttaaagcgcaaattgccgcctggtataaggcgcttcaggaacagatccccgactttattccccgtgcgccgcagcggcagatgattgcggacgtcgccaaaacgctggccggagaagaagggcgacatctggcgattgaagcccccaccggcgttgggaaaacgctctcttatttgattcccggcatcgccattgcccgcgaagagcaaaaaacgctggtggtgagtaccgccaacgtggcattgcaggatcagatttacagcaaagatttaccgctgctgaaaaagatcattcccgatcttaaattcactgccgcttttgggcgtgggcgctacgtttgtccgcgtaatctgacggcgctcgccagtactgaacccacgcaacaggatctgctggcgtttcttgacgacgaactgacgccgaacaatcaggaagagcaaaaacgttgtgcgaagctgaagggcgatctcgatacttataaatgggatggtctgcgcgatcatactgatatcgctatagatgacgatctctggcgtcgtttaagtaccgacaaagccagctgcctcaaccgcaattgttactactatcgtgaatgcccgttttttgtcgctcgtcgggagattcaggaagcggaagtggtggtggcaaaccatgcgctggtgatggcggcgatggaaagcgaagcggtattgcctgacccgaaaaatttactgctggtgctggacgaaggccatcacctgccggatgtggcgcgggatgcgcttgagatgagcgccgaaatcaccgcgccgtggtatcggctacagctggacttgttcacgaaactggtcgctacctgcatggagcagtttcgcccgaagaccatcccaccgctggcgatccctgaacgtttgaatgcgcattgtgaagagttgtatgagcttatcgccagcttaaacaacattctcaatctctacatgcctgccgggcaggaggcagagcaccgttttgcgatgggcgaactgccagatgaagtgctggagatctgccagcggctggcaaaactcaccgagatgctgcgtggcctggcggagttatttcttaacgatttaagtgagaaaaccggcagccatgacattgtacgtctgcatcggttgattttgcagatgaaccgcgcgttggggatgttcgaggcgcaaagcaaactctggcggctggctagcctggcgcaatcttccggtgcaccggtgaccaaatgggcgacgcgggaagagcgcgaagggcagctacacctctggtttcactgcgtgggaatacgtgtcagcgatcagctggaaaggctgctgtggcgcagtattccgcacattattgtcacctccgcaaccttgcgtagcctgaacagttttagccgtttgcaggagatgagtggtctgaaagagaaagcgggcgaccgttttgtggcgctggattccccctttaaccactgcgaacagggcaaaattgttattccccggatgcgcgttgagccttccatcgacaacgaagagcagcatattgccgaaatggcggcctttttccgtaagcaggtggagagcaaaaaacatctcggtatgttggtactgtttgccagcggacgggcgatgcagcgctttctcgactatgtgacggatttacgtctgatgttgctggttcagggcgatcagccgcgttaccgtttagttgaactgcaccgcaaacgcgtcgccaacggtgagcgcagcgtgctggtgggcttacagagttttgccgaagggcttgatttgaaaggtgatctgctcagccaggtgcatatccacaaaatcgcttttccgcccatcgacagcccggtggtgatcaccgaaggggaatggctgaaaagcctcaaccgctatccgtttgaggtgcaaagcctgccgagcgccagctttaacctgattcagcaggttgggcgactgattcgaagccacggttgctggggcgaagtggttatctacgacaaacgcttgctgaccaaaaattatggcaagcgactactggatgcattaccggtatttccgatagagcaaccggaagtccctgaaggtatagttaaaaagaaagaaaaaacgaaatccccacgccgtcggcggcgttaatgatgtgagtcaggtaaggagtcgtaaatggactatcgcaaaatcattaaagagatcgggcgcgggaaaaaccacgcgcgcgatttagaccgggatactgcgcgcggtctgtatgctcatatgctcaatggtgaagtccctgaccttgagttgggcggcgtattgattgcgctgcgtatcaaaggagaaggggaagcagagatgctcggcttttacgaagccatgcaaaatcacaccatcaagctgacgccgccagcaggcaagccgatgccgattgtcatccccagttacaacggcgcgcgtaaacaggccaacctgacgccgttgttggcgattctcctgcacaaactcggttttcctgtggtggttcacggggttagcgaagatccaacccgcgtgctgactgaaaccatttttgaattgatgggtattacgccaacgttgcacggcgggcaggcgcaggcgaagctcgacgaacatcaaccggtgtttatgccagtcggcgcgttttgcccgccgctggaaaaacaactggcgatgcgctggcggatgggcgtgcgtaacagtgcacataccctggcgaaactggcgacgccatttgccgaaggtgaggcgctgcgtctttccagcgttagccatccggaatacattggacgcgtcgcgaagttctttagcgatatcggcgggcgggcgctactaatgcatggtactgaaggtgaagtgtatgctaatccgcagcgctgcccgcagatcaatctcattgaccgtgaagggatgcgggtgctgtatgaaaaacaggacactgctggtagcgagttactgccacaagcaaaagatccggaaaccacggcgcagtggattgagcgttgccttgctggcagcgaaccgattcccgaaagcctgaaaatccagatggcttgctgcctggtggctacgggtgaagcggcaactatcagcgacggcctggcgcgcgttaatcaggcattttaattcttttctcagccggatgagccatgtcatccggcttttaccccaccgcaatatgaaattcctgcatctttattgaccttcccacgcccggcgtgcagcataaaaatacaacaaacacataacataaacaggagttaaccatggaaagtggtcatcgctttgatgctcagacgctgcacagttttattcaggctgtatttcgtcagatgggtagcgaggaacaagaagcgaaattagttgccgatcatttaatcgcggcaaacctggcagggcatgatagtcatggtattggcatgatcccaagctatgtacgctcctggagtcaggggcacctgcaaattaaccatcatgccaaaaccgttaaagaggcgggggcggcggtcacgctcgatggcgatcgcgcatttggtcaggtcgcggcacatgaagcgatggcgctggggattgagaaagcgcatcagcacggtattgccgccgtggcgctacataacagccatcatatcggccgtatcggttactgggcggagcagtgtgcagcggcggggtttgtctctatccactttgttagcgtggtcggtattccaatggtcgcgccgttccacggtcgcgacagccgctttggcaccaatccgttctgtgtggttttccctcgtaaagataatttcccgctgttgcttgattacgccaccagcgccattgcatttggcaaaacccgcgtcgcctggcataaaggcgtccccgtgccgccaggttgcctgattgacgttaacggcgtgccgacgaccaatccggcggtaatgcaggagagcccgttgggtagcctgttgacctttgccgaacataaaggctacgcccttgcagcgatgtgtgaaattcttggcggggcgctttccggcggtaaaacgacgcatcaggaaacgttacaaaccagtcccgatgccattcttaactgcatgaccactatcatcatcaacccggaactcttcggcgcgccggattgtaacgcgcagaccgaagcctttgccgagtgggtgaaagccagcccgcatgatgatgataagccgattttgctaccgggcgagtgggaagtgaacacgcgtcgcgaacggcagaagcaggggattccactggatgcgggaagctggcaggccatttgtgatgcagcgcggcagattggtatgccggaagagacgttgcaggctttctgtcagcagttagccagctaaaaaaaagcccgtccagtggcggacgggcaaacaagggtaacataggatcaatgagggttagagcatatgcgtctgtcggcaaacagacagggaaatacttgtgctggacgtagcgtaaacgcctgatccgtccaacggttcggattttgtaggcctgataagacgcggtagcgtcgcatcaggcatctgttgccggatgcggcgtaaacgccttatccgtcctacgaattacttataaattaccgcagtaccgcttaatttattgttgttggtggcggaagtgatgctgtatccactggcaccggctgccgcggctttctcagccagtttcgcttccagggcatcgagggtggatgcgccatcggcagaaaccacgccgattttattcatgttctgtgcctgggatgccgttaccggttccgccgcgaacacgccaaaactcagagtactaagagccatagcagcaacaacagtattgatagttttcataattaatctctcgcaggtgatttttgtataagtgacgttgtttcgtcgatgtgatgagtatcacgtttttttacgagagataaaatcgaagagaattgaccgccttgttcaaataaattgattgatatctaacctactgataaaccatttatttgttgtacttatgaacttgttttataccgcgtggcagtcacagcagcgttaaaggcacggaatgacacgcaaaatacaaattatactcgctatgcatctcgccagttgtagttaacgtaactggctgtctttgctacctctgcgattatatcctgtataagctggtttttgtaaatctttctcctgctgacaatgaatacataagcgcacgccaggaatggcttcccgacgggcctgcgggatgggggcaccgcactcttcacattcatccaggctttcgccgcgcggaatttcaccccgagcgcgggcaatcgcatcttcaattgtactgttgatctgttcgttgacggcgtcatcgttagcccaaccggatgccatatcgacctccccatatcaatacttgtacagttaagtgtagctaatccagggacgaactcgggcagttcaagcatcagatctcgctccattcccgcagcagattatgataaagattaagcaggctcaggatctcttcactttcgccgtagcggcttttcaggctctgaatattgttgtccagttcaaacagcatggcgcgctttttatcatcgcggatcatgctctggatccacataaaacttgccactcgtacgccgcgggttacgggtgtcacgcaatgcaggctgctggagggatacaacacgagatcgcctgccgggagttttacccgatgttgtccgaaggtgtcattaacgaccagttcgccgccgtcgtagctttgtggatcgcttaaaaacagcgtggcagaaaggtcagtacgcatccagccgttttgtggatggctgcgtactgcgccatccacatggaaaccataggtttcattgttctgatagcgattaaacagcggcgtggaaagggtacgcggcaaggccgcggcaaagaataaagcatgttggttaaccgcgttcagcacctcattttgcagggcggcgtataacgtgctgcgggtgtcgacctgttgattgttcttaacttgcgcaccttgtgcgccggtggtgacgcgtccatccacccattcggcttgttccagttgttcgcgaaaacgagcgacgtcctgtgggcttaacacgccgggaatgtggtacatcatacaatttctccaaaaagtggggcctgcgccccacatctgaatcagaaatgcatattggctgtgagcaagaaggttcttggctcgcccgggtgataacggtagccgctcttgttgatactggcgacgtaatcggtatcaaacaggttgtaaacgtttagctggaagtcgagattgcgattaactcgataccccagtttggcatcggcgacccagtaaccttcggtaaacgctggcgttcccaccgcgccgtcactacctttatgcatactgccgatatagcgtgcgcccgcgccaacagagatatcgtcggttgcctgatattggctccataaggtgaaggcgtgctccggggtatacggcaggctactggaaccatcctgggcaacatctttgccgtttttgatggttgctttttgctgggtatagccgccaatcacctgccacgcgggagtgatattcccggccacggatatctcatagccttcgacgcgtttcttaccgtattggctgtaagttccgtcatcattttgctcaacttcattttcgatatcagtgcggaacagcgcggcggtgagcaacagacgtttatccagaacctgccatttggtgccaatctcgctggtgttggctttttgcggtttaaaatcggtgcggttggcactgttaccgctgccagactgcgcaagggcgaagttgttgccgcccggaggctgctgggaaacggcatagttaatatagacattgccgttttccgtcaggtgatacagcgccccggctttccagttcatcagattgccgctcttggcggtgtcgacggtggtgaccggagaaccttttgccacaccagttgggcaggtgatggcaccgcgtccgctgccgccgcaggcggtggcactgtcatattcagtatgataattatccagacggatcccgccgttcagctcaaaatcacgggtgatttgcagcgtatcaaaggcgtaaattgcgaaggtatccgtctgaccattggcgtttgcgccgttgcgcgtcaggccgccgggatgaatgctgctgtcaggatgataaatatttaccgcgggtaacgtcaccggattaacgccgtagttagtctgcgtttcacgggtaaattccacgccggtactgacatcatgaccgatagaaccggtatagaacgtgctggtcaggttggtctggttggtgagaattttattactcacatctttggtattcgccgtgcgactccaggtccagctattcacatcgctggtgggctgagtaatattgctcgccccgcccataatcgccgtcatcaggtaatcctgctttacgcggctccaacgggtagtattgcgaatggtggtgttatcgttgatgtcgtgctcaaaacgcatggtggcggtgtcggtggtgctatcgtcgtaatcggaatccgtgccgtaaaagttatgagtatcaacttttccggaatgattcagggccgccgttcccgcagatggggcagaatagcccggcaaaccgatggtcggaatgccgccgtctggcgtgttgtgctgggtgacatgcagataattaagatacaaacgattcgctgtaccaaggccaaaagcgacagaaggggcgacgccgtaacgctcatttttgactttgtcgcgtccggcatcgtgcgttttttcgcccattacattcaggcgcaccgcggtggtatcaccaatgacctgattgacgtccagcgtgccgcggcggaaccaggcgctgccaatactggcggaggcgtcaatgccggaatcattgcgcggctgcttgctgatcatattgatgctgcctgtcggtgcgctgcgcccgtagtcggtgccggacggccctttaatcacttcgacctgctcggtattgaaggtgtcgcggctgacgctgccgatatcgcgaatgccatcaatataaatactgttagaggtatcggcaccacgcatataaatggcgtcgccagtggtggagttaccgttctcacccgcaaaaaacgcacccacgccggggacgtttttgagcgcgtcggtaaggttggttgcgccctgatctttaatcacttgttcagaaattaccgtcatcgtgcgggtagtatccgctaccggacggctgaatttcggatcggcagattgttgtggcgcataaaggctaggcgtacttgcttcgacaaccagcgtgtcatccgcgttagtttgcccttcggcggcgagtgcctgagccacaggcgtgatgccaatacaaagaccggcaaagaacgtgaggctatgaaattgtctggcagggaaattgcgattgttttccattttgcaggtgactttttcttatatgttgaaattttcactgccacgagaaagcctctctgcggatgcgatgccactgttaatcccgtgatagtgctcgtgaaagtgataataattttgataagcattatcacttggagcgattttctatcacccattgcgcgaaaaagaaatacatttatttacattgagttcatatttgatgttttttgattacaaaacagacgaaaactgcatccagaggcgaatgcagttacgttggtggggttatttgtagatggttgcagtaccgaacatctggtcatttccgcctgcggaattaatgacataacctttcgcgccttgttcgcgcgctttttctgccagtttatcctccagatcgcttaggttacttgcgccagttgcgctaacggtaccggcgggccgtagctgaccgctgtccaggttactcatcggttgcgcggcataagccgtgagagagattccgctcaggacggtggcaatcagtagtgtgaggcactttttcataatgacatcctcataaatacaacgggtagtgcctgataagtgtaggtcgcctgcgcgatgcaaatgacgcaaaaaattgacagagatgtgcttattttttgaacgatatatttttacaaaataagacaaatcaatgacatgcataatgctgatttttatgatgaattgccataaaccatagccatgttaaggttttggggaatgataaacgcagccagatatttaccctgtcgcgttatgcgggtatcttacgccgctgcttaaaggagaatgctatgtccgcccagaaaccggggttgcatccgcgcaaccgtcatcacagccgctacgatctcgccacgctttgtcaggtcaatcctgaactcaggcaattcctcacgcttacacccgccggggagcaaagcgtagactttgccaatccgctggcggtgaaggcgctcaataaggcgttgctggcccatttttacgccgtagcgaactgggatatccccgacggttttctctgcccaccagtaccgggccgggcggattatattcatcaccttgccgatttactggcagaagcaagcggaacaattccagcgaatgccagcattctggatatcggcgttggtgcgaactgtatttatccgctgattggcgtacatgaatatggctggcgttttaccggtagtgaaaccagcagccaggcgttaagcagtgcgcaggcgattatcagttctaatccggggcttaaccgcgccattcgtctgcgtcggcaaaaagagagtggggcgatttttaacggcatcatccataaaaacgagcaatacgacgcgaccttgtgtaacccgccattccacgattccgccgctgcggcacgggcaggtagtgagcgtaaacgccgtaacctggggctgaacaaagacgatgcactgaactttggcggccagcaacaggagttgtggtgtgaaggcggtgaagtcacctttatcaaaaagatgattgaagagagcaaaggcttcgcgaagcaggtgatgtggtttacaagtctggtatctcgtggtgaaaacttaccgccgttgtatcgtgccctgacggacgtgggcgcggtgaaggtggttaaaaaagagatggcccaggggcaaaagcagagtcgctttattgcctggacctttatgaacgacgagcagcgccgccgttttgtcaatcgccagcgttaaagcgttggttcccccggcggtaacggttcagccggggtcgcgcccggagcaggcagcacctgataagtctgcactggcgcgcgaacgcccgccaggtcgaaatgttttttcacctggctgtcgagggcaaagcgtaccgtccactgtttgagtggcagcgtggtgaagctaacacgcagtgtaaacgcggtattgcttaagccgacaatcccggcaaaattcggttcaccaataatcagcccgcgaatttcttcgttttccattaattccgctaccgcatctttcagtgcctgattggctttatcagcatcttcatggcgatcaacatcataatttgccaccacgctaccaatgccgcggacaaagttagcaaaggtggttatgctagaccacggaatgatgtgatacgccccggtatcctgtcgtacgcccacggagcgaatgctcatccgttccactgtgccggtcaacggcccgatagtcaccaaatctccagtgttcatgccgttttcaaactgaataaataccccggtgataatatctttcaccagcgtttggctaccaaagctgatagccagacctaatgccccggcacctgccagcaatggcgcgatattgacgccgatttcgctcaacacaatcatgatggtgatggtactgataatcaccgccagcgcgttacgaaacagcgtaagcagggtacgcgtgcgggcgctgggtagcgggcggccatgaatatcgctagccagccggttttcgatcaaactggcgagcaccgtccagccaaccgcgctgaagaaaagaatgagtgcgatacggatcaggatatctacggttttctgccccgcgccgttttgcagccagttccagaaatcgaacaatccccatgcgctcaacagcaacattaccgccacgcagactgtcagaatacgcgccgttttcagcgccgcgctcagccagccattcaaccgtttttgcagctccggatagttacgctgagtatgtgggctgagagtgatggttttcgccagccagcgggaaaacataccggaaacaaacgctgcgataccaataatcgccaggctgcgcaccgttgcacccatcataaatttcaggctgttgcccggatcgaacaagctaaagaaaaacagcacgataaaataggcgcttgccagccagtgccacaccagcgcaaaggcgcggataaacaggctgaaaaaggccaggctatgctccgcgaagttgagcaaatgctgggtaatctcttttttattacgaaagatcaggtacaacgcccagacggtcatgcacagcataatgatgacgttcgccagcgcacctatctgtacattcacctgattagagataatcggcacggccacaatcaggccataacctatcaaactgcttaaccagctcaggcgacgactccagtaacgggcgctctcgtcctgaatcgtgaacgggcgcagctccgccacgtttgggcaaaaaatcaggcgtagtacggctttgaaaaattcaatgagggcaaaggcgttgagaaacaaactttgttggaaagcgatggtgcgactgcctgcattcaggttgtcgcttaatacctggccgacaaataatgtcagggccagtaacagcaggtcgataataaacgccccgataatcatcgccggaagctgcaaccagttactgcgctcacgatttttttgccgcgcccactgacccattttgcgatacagcggcagtgcgcacaggcgaatcagccagtaaaaaccaaacactaataccgctaacatactaaaatgggtcagcgcattgctgaaggtttgtggattaaacggcttatgcggggagccggtgatattgcgataaagttgcccgaagcgggcggaaagggcttcaccataatggcggctgacttcggtgaccttttgcagcacggtttgctcttcgaccagcgtcggcggcactatttttggtaccggttcagcagggggcgtagcggcaacggtgcgcaactggtcgatcaactctttacggctggtgtcattatccagcacatccgccagtgcgccataggccgcttttttttgttcgatatccggttccggggccggttcagtcgtactgtccgttgtcgttgtggttgtaacgccgggtatggataccgcgtgggcaggtgcgcccagcaggcagaagaggatgaacaggatccaccgcatgactcctccagtgagaaaatagagcaaaaagataagtatagatgctggaggaggggcgattttaaatgagaggaatctggtgtgcctccctttcgggtgaaagggaggaagggatattaagcaggttgctgacaacgtgcgggcttttttgccggatgcggcgtgaacgccttatccgtcctacaagttcatgcaattttaataagttgccagatatcctgtaggcctgataagcgtagcgcatcaggcaatgtgtcttattaagagacgtgctgcaaaaattcctgcaagcgctggctcggcgggttcttgatcaacacctgcggattgccatcttccgcaatccggcctttgtcgataaagatcagccggctagctactttctcggcaaaaccgatttcgtgggtcacgatcaccatcgtcatcccttcttcagccagatcctgcataaccttcagcacttcatggcgcagttccgggtcaagagcggaagtcggttcatcaaacagcatcattttcggcttcaccgccagcgcgcgggcaatcgccacacgctgctgttgaccaccagaaagttcggaagggtagtgatgtgcacgttctgccagaccgactttcgccagcagctcacgtgccagtttttccgcctcttctttgttcgcgccacgcacgcgtagcgggccaaacatgacgttttccagcgctgtcagatgcgggaagaggtaaaactgctggaacaccatacctgcttcctggcgaatcaggcgctcgtcaactttcggatcgttaaccttcaggccatcgacaatcagatcgccggaggtgatttcttccagtttgttgatgcagcgcagcagggtgcttttaccggaaccggacggcccgataatcaccacgacttcgccctgggcaatgttcaaatcgatattgtgcagcacctgggttgggccaaagtgcttggagacgtttttaaattcaatcacaggattttcatccttctttccagacgacgcagaataaagctcagcaccagggtaataatcagatagaacaccgccacggcgctccagatctcaagggcgcggaagttaccggcaataatttcttgcccctgacgggtcagttccgccacgccgatcacaataaacaggctggtgtctttaatgctgatgatccactggttacccagcggcggcagcatacgacgcagtgccagcggtaaaatgacgtagcgaatggtttcccaacgactaagaccgagcgccagtcctgcttcacgaaaacctttgtggatagacagcaccgcaccacgcgtgatttccgcaatatacgcgccggagttgatcatgatggtgaccaccgccgcagtaaatgggtcgatgcgtaagtcgttaaacgccatcggcagggcgaaataaataaacatcacctggacgacgataggtgtgccgcggatcacttcaataaagaccagcgcgacgtggttggctatccaacctccgaaggtgcgtgcaaaacctgccagcaatccgattaccagaccgcctgccagaccgaggacgctaatccacagggtcattttggcaccttcaatcagaagcggaatggcaggccagatggcactccagtcaaactgcatatgttgttcctgttaccgtggtgtaaataatcaaattcagggtaattaatggccccggagcgggtttgcgcccctcaccctaatcctctccccataggggagagggaactgccagtgcgttttacaggtgtagcgttattatttcggttcagtaccgaaccattttttgtagatttcgttgtaagttccgttctcgcgcagggttttcaacgcgccgttgactttgtcacgcagctcgtcgctacctttcgggaacgcaataccgtattgctgcgcttccagagagtcacctaccgctttgaactgaccgttaccggcggttttgatgaagtacagaatgtttggcgtatcgtgcagaacggcgtctgcgcggttggtgcccagttccatataggcgttatcgatgttcgggaactgacgcagatctttagttttgatgtttgctttcgcgtaatcaacggagccagtaccgctcttcacagcaaccactttcccgtcgagatctttcacgcttttcacatcgttattgttagctttcaccatcactaacaggccgcttttgtagtagccgtcagagaaatcgatcgcttttttacgctcgtcggtgatggtaatgcccgccagcgccagatcgacgtttttggtttgcagtgccggaatgatcccactgaaatccatcggcttcagttcgtaatccagcttcagctctttagcgatggcagcccacagatcaacgtcaaagcccacatatttatcgccctgtttaaattcaaacggaacgaaggcggtatccgtcgcgacaactaattttttatccgcggcatgagaagaaaccgcaaaagccagggtcagtgcagccagactaacttttaatacagacttcatagcatttccttttttctatccacgggacgatcccctgcgtgacattcacatatatgaaaaaatcgtgccagttttgcaactccttgatttttcgagatgcggcaaaaacgtgatgcacgatttatagggcaataccctgaagatgcaccattctggggcaccaatctggtgcgctaaaattgtgcactcaacacagtgattatttagcgtaaaacctgatgaaaaaacaatctttatgtaacgattgtgtgatgatgtggatacaaaaaatttacttaatcagctggagatagcagatggatgcactaaataagtgcgttgaggtgggctgcaaaacaaaacggcctcctgtcaggaagccgcttttatcgggtactaaagttctgcaccatcagcgatggatttattcgatgttagactcgataaaccacaggaatttatccaggtcgcgagacgcggcggtcaggatatctgcggtgtcgtcatctttcgcttcgccaatcgctttgcgtacgtcattagcgacgattgcgtaacggtcagccagttctttcaggtgatcctgaacgttgtggatgtccagcgggtaacttttcagcggggttttgctgttgataacttgagtggtccccagagctacaccgcccagctgcactgcacgttctgccatggtatccagatgatcgatcagtgcggtgcggaagccatccagcatttcatgtacggcaatgaagttagcgccgcgcatgttccagtgcgcttgtttggtaatcaaagaaagatcaataaactggataacctggcgattcagcaactctactgttgcttttttctcgctgtcggagacatcgttgcgggtataaagcagattggtcgctttacttttaactaatttagcggtactcataatttcatatcctcttgatgttatgtcccagtaattaacgagattaagtatagcaccggctatgtgttccgctattctggctgttcctatcacactaatagtggtaacaagcgtgaaaaacaaaactaataaagattcaatgagttagatatattgataagaacaattcttatttatctgctcgccaggaattttcggaataaatatgcttttgcataattcgatatataaagacggtgtagaggaaaagtagcgagaaattctgcatggttatgcataaccatgcagaaatgtaaatttaattaatgtctaattcttttattttgctctctttgcgtactgtcagcgtagaccccatactagcggcgatgatagcgccgagcgccagtagctgtatgggtgtcagtgtttctccgaggaaaatcatcccggaaacggcagccagcgccggttccatgctcatcagcgtaccaaatgtccgtgttggcaaacgggtgagggcaatcatttccaggctataaggcagagcggtgctgagaatagcgacagccagacccaatggaataacgctccagtgccagagtgcttcaccagcctgaagcgctccaattggcacgaaaattaacgctgcaatcaagctaccaattgccaccgtcgcagggccatgttccgctcctgcgcgttgcccacttaaaatgtaaatagcccaacaagccccggcccccagtgccagcgcacagccggttaaatcgacatgggaaacgtcttgccccagcggtagcaggaaccacagaccaagaaccgccagcacaacccagacgaaatctaccgggcgacgagaagagaacagcgccaccgccagtggtccggtgaactccagcgccaccgcaatacccagcggtactgtctgaatagaaagataaaaaagataattcatcccacccaggctaacgccgtaaaacaacagcggtaaccgttgctctttggcaaagcgcagtcgccatggcttaaagaacgcgatgaggatcagcgttcctaatgccagacgcagcgcagtgacacccggtgcgcccaccagaggaaaaagactcttagctaagctggctccaccctgaatagacgccatggcaacgagcaatatgactattggtaaccagaccggcattttacgtaaactaccaggcatcctttctcccacaaatatctagacttaagtaaagcgtggagtgtactggatatacccaatgctggttgagcatttgttgaaaaaattttcccccgttttgactaaaatgcgccaggattgatggaatcattagtctggtgattaggaataatctggatgaatgacagggaaaacatgcgtaatacttacgcagttctctgaaaaagtgatttaaatttagatggatagcggtgtatggaaacgttctgttacatgaaatggcccgttagacatcacaaatcgcgaagagtttcccattaatttttgatatatttaaaacttaggacttatttgaatcacatttgaggtggttatgaaaaaaattgcatgtcttagtgcactggccgcagttctggctttcaccgcaggtacttccgtagctgcgacttctactgtaactggcggttacgcacagagcgacgctcagggccaaatgaacaaaatgggcggtttcaacctgaaataccgctatgaagaagacaacagcccgctgggtgtgatcggttctttcacttacaccgagaaaagccgtactgcaagctctggtgactacaacaaaaaccagtactacggcatcactgctggtccggcttaccgcattaacgactgggcaagcatctacggtgtagtgggtgtgggttatggtaaattccagaccactgaatacccgacctacaaacacgacaccagcgactacggtttctcctacggtgcgggtctgcagttcaacccgatggaaaacgttgctctggacttctcttacgagcagagccgtattcgtagcgttgacgtaggcacctggattgccggtgttggttaccgcttctaatcactttggtgatataaaaaatccgcctctcggggcggatttttgtttttaaggtttcgggtcgaaaatatcggttccgagatggttgtaatccaccttctgtaactggaagttggtgatgtatatcggcccggctttcttctcagatataaacgggtatttgatgttaatttccttcgctttaatccccgtccactgggagaaaaagcctaagaagtcattggcactgcggcgggctttaatcacacgatgcgctttatcgtcgctggaaatgaccataaaaggcacctggaaattttgctgatatttatcatcatgggcaaggtattgcacgtctttaccgcgctctttaaaggccagaccgtggtcagaaaagtaaaccaggctgaagctgctgccgctgttgcgtaactgatcgtacagcttgcgcagtaaatcgtccgtttgcgtcatggtatagagatagcagctcgtttctttgctttgcacaaaggtttcgtattttccttgtgtcctgtcgcaggcctgcggatgactgcccatcagatgtagaacaatcagctgcggttggctgtgctcttgcgccagcacttgagcggtcatatccagtaacgcttcgtctttggtgtttttatctgcttcaaaattaccttctttcaggaagtacacttcatctgctcgtttggcgatgctggcgatagcggtatcgtattcgccgatttgaccctggttggaaaaccaccaggtctggaagcccgcgcgatttgccagggtgacaaagttatcctgaaactgtggtttgccatcgacaacgcgattgagcgttaagccaaggcttttctgcgtggagccactggcggcaatgtagtcagcaaatatcaaaccgttaacgctgctggcaaacggggtattgtcccagtgaccgccaaaggcaccgagggcatcgcgacgcgcgctttcaccgatcaccaccacataggtctgatacttcggcttaacggcagtgaccgtccaggtatctttcattccggaaagttttgccatccgttcttgctcttcaatcacctcgttattattgacgatgacatccttagcaaaacgaaataccggatagccagtatctttcagtttaaatacgccaccccaggccaggttttgcacgggagcaacaaaaaatgtcgccacactgaataccagacacaggctgtcgaaggtattccagcgcgctttttcattctctttttttcgcctgattgctattacgccgagcgcaaaaataaataagccgaccaggtagctgtaccacggaaaaatcgtcaggatttcggtgctctcttccatattggtggagtgcaatgccagcaatgtattgaaattaggcgcgccgtaggcctgagcaaaagggaaataacaagccgccaccaggctactgacaccgaccagaactttttgtacgcgaggcaatgttcgccatagcaaaagcaaaatagccgtaaacgcagcggtgtagagcaaactgaaggggtaacctaagccgaggttaattaataggctctgtaaaaagtagaacgcagtccacgggctaaatacccggctacgggtaacaaggctttctttgagggttaaattcatatgccactatcgtaacaaacgccatgtgcttaccctggcgtcaagggtcaatacctgcaagagtgcgtgaagagtggaaaggggtccgcatccgcgagccgcaatatacgcagggctgcaagaagatagagcgagccgccgtagtggtcaactactgacgaacaaatcttttgcgaaggggattgcaaatccgacaaaaagtggggtttttcagaccaaaacgcgttatgcctgcatgaaagcaggagtgaagcggcgtaccgcgacgccgctatttatcggaaggtttatcttgctgcggtttgttgttgaccatatcgcacaacatagagagcagcattaaccgtactttaaagggagaatgactaaacacgcgcatacacctcttgaactcattcataagacctcctgacttgctaatcccgtcgatccttgaggggtgattgcattacatacagatatagcacaggctatattatatagctattgctaaaacgttaattttttgtaccttcgcaactctggtttacaatgtgcgcacgaaatgagaacgctatgtatgcgtcaccataatgaggaagcacaatgagtcgtcgcgcaggtacgccaacagcaaaaaaagtgacgcagttagtgaacgtggaagagcacgttgaagggttccgccaggtcagagaggcgcatcggcgcgagcttattgatgattacgttgagctgatttctgacttgatcagggaagtgggggaagctcgtcaggtggacatggctgctcgtctgggagttagccaaccgacggtggctaaaatgcttaagcggctggcaaccatggggctgattgaaatgatcccctggcgtggcgtgtttttaacggcagaaggagagaagctggcgcaggaaagccgcgagcgacatcagatagtcgaaaatttcttgttggtgttgggcgtcagtccggaaatcgcccgtcgcgacgcggaaggcatggagcaccatgttagtgaagagacgctcgacgcttttcgtttgtttacccagaaacacggtgccaaatgagcctgccttttttacgcacgctgcaaggcgatcgtttttttcagttattaattcttgttggtatcggattaagctttttcgtgccctttgcaccgaaatcctggcctgctgctatcgactggcacaccatcatcaccttaagcggcctgatgctgctgaccaaaggtgtggagttaagcggttattttgatgtgctggggcgcaaaatggtgcgccgctttgctacggagcgtcggctggcgatgtttatggtgctggcggcggcgctgctttctacctttctgaccaacgatgtcgcgctgtttattgttgttccgctgactatcacgctaaaaagactgtgtgagatcccggttaatcggctgattatttttgaggcgctggcagtcaacgctggtagcctactgacgccaattggcaacccgcaaaatattcttatctggggacgttctggtcttagctttgccggatttattgcccaaatggcaccgctggctggcgcaatgatgctgacgctcctgctcctgtgctggtgttgtttccctggaaaggcgatgcaataccatacgggggtgcaaacaccggagtggaaaccgcggctggtgtggagttgtctggggctgtatatcgtctttctgacggcgctggagttcaaacaagagctgtggggactggtgattgtggcggcaggctttgcgctgctggcacgtcgcgtggtgctcagtgtggactggacgctgctgctggtgtttatggcgatgtttatcgacgtccatttactgacccagcttccagcgttgcaaggcgtgttgggtaacgtgagtcatctatctgaacccgggttatggttaacggcaatcggtttaagccaggtgatcagtaacgtgccgagtaccatattgttgctgaactatgtgccgccgtctttattactggtatgggcggtaaacgtaggtggctttgggttattacccggaagcctggcaaatttgattgcgctacgtatggcgaacgatcgccgcatctggtggcgtttccatctctatagtataccgatgctgttgtgggcggcgttggtgggatatgttttgttagttatactcccggccaactaaggtctggcaaataaaaaaggcggattatgagtccgccttttgctttaagttttgaagattaattcagacgaaccggcatcccggagcggtttttaatcgcttcatcaagaacaacctggtcaacatctggctgaccggtcactgtctgcacgctcttcgtcagggtaattggcacaatttcctgaccttcaaactgggcttcggtggtagacagcgggttatggacttcaatataacggctgccgtctggctcggtggtcgcttttaccggctcatcaataaactgtacgcgggtaccgaccggtactttctcgaacaggaatttgatgtcttcgttacgcagacgcacacaaccatgacttacacgcaggccgataccgaagttggcgttggtgccatggatagcatacaggcgaccgatatagagtgcatacagccccatcgggttatccggacctgccggaacgacagccggaagcggttcgcccgcagcgcggtactctgcgtgcattttggcggtcggcgtccaggtcgggcctgcttttttacgctcaactttggtggtccagttgataggcgtatctttgcctaactgaccaatgccgatcggcagcacgataacggtgttggtccctttcggatagtaataaagacgcatctcagcactgttaatgacgatgccttcatgaacggtatccggcaggatcagctgctgcggaatgttcagtacagtaccgcctttcggcaggaaggtatccacacccgggttcgcttccatcatattggaaagccccatctggtactcggcggcaaaatactccagcggctgagtgttaccttcaggaatggtgatcacctgattctgaccaaccaggcgactcccgtcggttggcagaggataagttaccgcagaggcggtactgcaaaagccgacaacagcgaaggccgctgcgaataatgttttcaatttcatattcatgttaagcgagattttgtgcctggcaggccattgggttgagaatattagagtattggaagcgcattataagttcattccagctcacagtgaaatcagatgtgtacgaaatcacattttttgcctttggcttgagtgtagaccttaagcgaggagcaggatcttctttcagacttatggcataatgcgcggtttgtcatatctcttttcaggatacgcctgtgttagtttccagtaacgtcaccatgcagttcggcagtaagccgttgtttgaaaacatttccgtcaaatttggcggcggcaaccgttacggcctgattggcgcgaacggtagtggtaaatccacctttatgaagatcctcggcggcgaccttgagccgacgctgggtaacgtttccctcgatcccaacgagcgcattggtaaactgcgtcaggatcagtttgcctttgaagagttcactgtgctggatacggtgatcatggggcataaagagttgtgggaagtgaagcaggagcgcgaccgcatctatgctttgccggaaatgagtgaagaagacggctataaagtggccgatctggaagttaaatacggcgaaatggacggttactctgcggaagctcgcgccggtgaactgttgcttggcgtgggaattccagtggaacagcactacggcccgatgagtgaagttgctcctggctggaagctgcgtgtgcttctggcgcaggcgctgtttgctgatccggatattctcctgctcgacgaaccgaccaacaacctcgacatcgacaccattcgctggctggaacaggtgctgaacgagcgtgacagcaccatgatcatcatcagccacgaccgtcacttccttaacatggtctgtacccacatggcggatctggattacggcgagctgcgcgtttatccgggtaactacgatgagtacatgacggcggcgacccaggcgcgtgaacgtctgctggccgataacgccaagaagaaagcgcagattgctgagttgcaatctttcgttagccgctttagcgccaacgccagcaaatctcgccaggcaactagccgcgcgcgccagattgataaaatcaaactggaagaggtgaaagcctccagccgtcagaacccgttcatccgttttgaacaggataagaaactgttccgtaacgcgctggaagtggaaggtctgaccaaagggtttgataacggtccgctgtttaaaaatctcaacctgctgctggaagtgggtgaaaaactggcggtactgggtaccaacggcgtcggtaaaagtacgctgctgaaaacgctggtgggcgatctgcaaccggacagcggcaccgtaaaatggtctgagaacgcgcgcattggttactatgctcaggaccacgaatatgagtttgaaaatgatctgaccgtgttcgaatggatgagccagtggaagcaggaaggcgatgacgagcaggcggtacgcagtattctcggtcgtttgctgttcagccaggacgacatcaaaaagccagctaaagtgctttccggtggggaaaaagggcggatgctgtttggtaagttaatgatgcagaagccgaacattctgatcatggacgaaccgaccaaccacctggatatggaatccattgagagcctgaacatggcactggaactgtatcagggcacgctgatctttgttagtcacgaccgtgagttcgtaagctccctggcgacccgcattctggaaatcaccccggaacgcgtgatcgactttagcggtaattacgaagattacctgcgtagtaaagggatcgagtaagtgattatccgtcaccccgatactgtcggggtgacggcggctgatgacaaatgcaaaatagcctgatgcgctacgcttatcaggcctacgcagtacctgcaatatattgaatctgcaggactttgtaggccggataaggcgttaacgccgcatcaggcattaacaaagcgcatttgtcagcaatctgagtaacgtcgaatcgattttcttaatcccacatcaattcacttccattaattctcaaacatccatgcccaacgctcgcttaccgtgaatgttgaggtcggcaagcgtaaagcgtccttcccagtttgtttcatagtcctcgcgcgggaagtcgcccgggcttgcgcctttttccagtgcggccttcaccttgtgcgcgtaggcaagatttttctcgcacatcggtgccgcaggaatgtacatcacgttgccccaaccttgttgattttcaacgggggcaacggaatggatgacgtcgcagtgccaccagacggagtctccggcttcgagttttggaatgctggttaacgcctcaatcaacagtggatgccattgctcacttaccggcaatactcttccgggcgctacgccgcacagttcatcctccggcacatcatcaagcagcggacgtaacagtacgtacgccatagcttcaggaatgggcacgacgtgcagcagcccctgaccaggcagcatatcagagagcgctgtccagccctggaatgtccgaaacacggaacatttggtggtgttgtccaccgtgtactcttcaacttccgtacgatgtgccgcatgccagggatcatattgcgccagattgccattaaagacgttggcgaaaacgcgctgatacgctggaagcagccagcgttccagtgccccggagtcggtatgcgctccaagacctttggaggtcgttccgggcggacggcggcggatacggtcagggtagatgacgctcacatccgggttaaaccattgctttccatcactttcaaatgtccacagacgattgagaaagctctgcgcattcgccatttcttcactctggcgggcctgcatttgcgcctggctccagtagatggggtaaatctcgggacgactagcgctgagcgtcccgaagaaattatcgccggggcctttgtagacctcgtcaaagcggttgcggtccagatagtccagcatgctctgatcccagcctagcgcttgttcgcgggggaaatggccttttatcaccgcacaaccgcgacgtttaatctgttcgcgctgctctgcagtaacatgacctgctttgatatcggcataagacagcaccggccagacggcatcgccctgtgctttgagtgcgttgatttcagccactcgcgtggcaatgtcatcgcttagctgattaaagatctgctggacgtcgccaagctgcgcccgcagcgcgtgcttcatctgacggatagctgctttgtgatcggcaggcaatgtgtcgctggtaaaagtagaagccataaccacctctcattaactttcattcgaaaccattctgatttgcatgtgacaatataagttataaataagttaatgcaagtttaatgatttgatgtgatgtacaggatgtaaaaagaagggaaaaccggagcgcacggctccggtagagaggtcagctgttaaaaggggatgtgttatccagcaccgcctgaatcacattcagcgcgccttcatgattattatcatcggtagcgtaacgggcgatttgtttaatgttttccgcagcattgcccatcgcaaaggaataacgcgccattttcagcatctccgcatcgttaccgctgtcgccaatcgctaccacattttgcggactcagatcccagcgtttcagtaaccggctaataccgtttgctttatgtagaccgggaataatcaggtcgataaagccaaaaccactggtaacgggtttcataatgccatcgagcgctacgtgcagtttgtcgatcactaacgggatttgttcatccggcaggttgaggctaaacttgaacagtacgtcgtcaatctcctgataatcttttacaggtttcaggcgatggtagtgttttgccatcagtgcgacaaatgcttcgggggcattttcgctgacatatgcactttgcagaccgcaggcgacaaaattgagttgcttatcttttagcaactcgccaataacaatccggctttcatgtcgggtcagttcgccgtggaacaactgcttgccatgttcgtaaaccagtgcgccgttttccgcgacaaaagagatctcatcctttagctcaggaaagaaactaataagctggtaatactgattaccgctggcaacaacgaacttaatgccgcgctttttcagttcctgatattgcgccataaaacgtggttggttgtacgttttggcgtcgttaagaaaagtaccgtccatgtctgtgacgataacttttacgctcataggtgtgctcctggctcgaaaatgaaaccgtaacagtgtaataacaatgtgacgcagagcacaaattatatttcgaatgaaagtaaggatgaaattgatgatgtgaatgatttagcccggcgacgacgccgccgggccgaggagattacagcatatgttcagtacgggcgatgatatcgtcctgagcgtctggagagagcgcggtgaagaacgcggaatagcccgcgacacgcactaccagatcgcgatactgatcgggatgttttttcgcatccagcagcgtttcgcgggaaacgatgttgtactgaatatgccagcctttatgcacttcaaagaaggtacgcagcaggatcatcagtttctgcttgtcagattcgttctccagcgttgccggattcagtttctggttgagcaacacgccgccgagaatcgctgccgtaggcagtttacccacactgccaatgaccgcagtagggccaagatggtcagtaccggaggccgggcttgcgccttctgccagcggggtgtgggctttacgcccgtccggtgttgccatagtctgcgcgccaaacggtacgttagcggagatactactcgtacccgcgtaatagttgccgccaaccggaccacgaccgtagcgcggattatggtactgtttcagttcgtcgatataggtctgataagcgcgagccagcagcgtatcgacagtatcatcgtcgttgccgtacttcggcgcaccgttaatcagccgctgacgcagctgctcgtgagtcaggccgtcgaagtcatctgccagtgcggcagcaagctgttgctgaccaatcgcaccttgttcaaacaccagtttcttcactgccgccaggctgttgccgaggttggcaatgccgacctgcaggccagaaacccagtcatatttcgcgccgccttgcttgatacttttcgctcgctcaatacagtcatccaccagcgcgctgcagagaatatcgtgcacgttctcttccagcatggtgtcgacgacatattcgatttcgatacttttgcgggtgtagtaacggatttgcgtatcccacgcgtccatcacttcatcgaagttgttgaagttacctgcgctcaacgctttttcttgtggcaggaacactttgccgctggtggcatcatgcccgccttccagcgccgccagcatcacgcgggcgaagttgataaagctcatgccggtacagcgatagccccatttgccaccgacggcggtttctatacaaccaatcgctgcgtagtcataagcgtcctgcggttcaataccgagtttaataaattccgggatcacgatttcgtcgttgttgaacgccggcatcccgaagccgcaacggatcacctgtacgcaggcgtcgaggaaatcgttgctcattcctgcatggtaacgcacgctgaggttaggctgagtggaacgcaggcgaccgcaggattcgaggatcgcgtaagagagtggattcaccgcgtccattggttgaccatcaaccagattttgcccgccaatagtgacgttctgatacagcggacttcccgcagaggctttactgtgactgccggagcggatcttgttcacttccagcagtttcagccagcagctatgcagcatctcgatggcgtgttcgcgatccagcgtctggttgagttcaacgtcgcggcgatagtacgggtagagatactggtccatacgaccaaagcttacactgtgaccgttagattcgatctgcaaaatcaactggatgaagtaacacagttgcagcgcctgccagaaagtctgcggcggctggtgggcgataagatcgcagttttctgccatcgccagcagttcatcgcgacggctttcgcgggtttcggtcgcggccatttcacgcgccagggcagcgaaacgttcaatgtgttcactgactgccaccagcacgatatcaatcgctttcaggaattgctcaccgtgtaaatcttccagcaccgtcaggttgatgcggctgcgacgttccgctacttcctcgcgcagaccatcaagccctttttccagcagcagcgggaaattcaccgccaggtgcgcatcgccggaggtcatattgccttccgctttaatgattccggtcgccagcagacctttttgctcatcggtaaacatgccgtagcagcgatcctgtacggtctgaccgcgccaccacgggcacacttcatgcagaacgcgtttgttctcttcgctcaccgcaaagccagcaccgggacgatctgccagatcatcaatctctttttcgatccagctgacagtatattccgggaagatcggcgcggcgcgaacttcgcttgcctggttgccaatgatcaactcatcgtgtttgatccagatggtgcgattcgccaggtgatgcgccagtgccagcgcgcgacgtaccgggatcggcttatcgagatgttgttgatacatctcggtatagtgctgcgcgcgctcggtacagactggcggtttcacaatatgcaccagcgcatttttgtgcgctttaatgcggtcgctgagcgtgtccagtttcagtgtggtcatggttgttatcctcgtaaggtcgcggttaaccctttctggcaggcatactgctgggcaaagtcgagcagttctggcgcatcaagcggtttttccggggcgtcatagggcagattaagtaagtgatatttgttgatgcccagcgtgtggtagggcagaaaatgaatttcgccaacgtgcagctcgtcggcggcaaaatcggtaatggcttttacagaggtttcgtcggcattaaagccctgaatcagcggcacgcggataatgatttttttgcccgctgcggcgagttttttcaggttatccagcactctggcggcgttaccgtcggtccactgtttaaacggcgcgtcggcaacgtgttttaaatcggcaagaaacagatcgatatagggcagagaaggggcgatatatttccacggcacatgcagacaggtttctaccgcagtatgaatgcctgcctcgtggctggcttgcagtagcgccatcgccatttccggctgcataaagggctcaccaccgctaagcgttaaaccgccgccgctgcgatcgtaaaacggtttatcgcgcagaacggtcgtcatgatctcctcaacgcttttcacttcaccacacacggttaatgcctgtgtcggacagcagtcggttaacgccgtcagatgctccggggttaacttttcccgatgaataagcaaaccattcagcgcgcgctcaatcacttccggcgcggccttagcgcacagctcgcagccttccagacacagtcgtgcgtcatacagcagatcctgcgtgcgggcgcggctttccgggttctgacaccagcggcagcccaggctacagcctttaagaaatacgaccgtgcggataccggggccatcatgggtgctgtagcgctgaatattgaaaatcatagttgcctctctatttcgttcaagcattaaaatactttcgaatgaaagttagattgatgtgcgtcaactgttcagagagttttcccgtgatagtctacattcagacaaaaagtacattttgaggatggttatggaactgtatctggatactagtgacgttgttgcggtgaaggcgctgagtcgtatttttccgctggcgggtgtgaccactaacccaagcattatcgccgcgggtaaaaaaccgctggatgttgtgcttccgcaacttcatgaagcgatgggcggtcaggggcgtctgtttgcccaggtaatggctaccactgccgaagggatggttaatgacgcgcttaagctgcgttctattattgcggatatcgtggtgaaagttccggtgaccgccgaggggctggcagctattaagatgttaaaagcggaagggattccgacgctgggaaccgcggtatatggcgcagcacaagggctgctgagcgcgctggcaggtgcggaatatgttgcgccttacgttaatcgtattgatgctcagggcggtagcggcattcagactgtgaccgacttacaccagttattgaaaatgcatgcgccgcaggcgaaagtgctggcagcgagtttcaaaaccccgcgtcaggcgctggactgcttactggcaggatgtgaaagtattactctgccactggatgtggcacaacagatgattagctatccggcggttgatgccgctgtggcgaagtttgagcaggactggcagggagcgtttggcagaacgagcatttaaccggacgttctgcatcctcataaattgctgatgacgtggcggagtgccgcgtcttatcaggcctggaggtggcaattactgcccacacacctcacaccccggattacgcatcagtttcatttcgcgaaactgacaggtcatcgcatcgtacatgacgattttcccgctggccggtttgccataacctgccagcattttgatcgcttccattgcctgcaagctaccaattacgccgatcaacggtgccattacgcctgcttccacgcaggttaatgcattttcaccaaacaaacggctaaggcagcgatagcacggttcaccgtcctgataagtaaagacggtgatttgaccttccatacgaattgccgcgccggaaaccagcggtaccttcgcggcaaaacagcctgcgttcagttgattacgtaccgcaacgttatccgtacagtcgagcaccagatcgtgttcagcaatcaatgctgcaagttctgcgtcatccagcagtgcattgactggcgtaatcgcgatatgtgggttgatccgcgtcagggcgtcacgggcggattccaccttcggttgcccgaccgtggcatcactgtgcagtgtctggcgttgcagattgctgaggctaaccgtgtcgaagtcgagcagcgtcaggttaccgacaccggcgcttgccagatactggctggctgcacagccgaggccgcccaggcccactatcagcacgcgagaatctttcagcgcctcctggccgtcaaaatcaaagccgcgcagaatgatttgccggttgtagcgcagcatctcctgatcgctgagttccgccattacaggcctccgaacaacgcgttaaacggttctacttccacccattcgcccacttccacattgccgcgatcgcgttccagcacgataaagcagttgccgaggctaaaggagctaaatatatgactaccctgatgtccggtggtcgtcacttccagttcgccatcggcgttgcgttgcagcacgccgcgctggaaatcaagacgtcctggcgtttttttcaggcgggacgctgtgcgtacgcgctggcgcgcgggcaggccgctggcggtgttaccgcttagttttgccagcaaaggctgtaccagttgatagaaggtcagcgtcgcactaaccgggttgcccggcaggccgcagaaccagctattgctgagtttaccgaacgcgaacggtttacctggtttaatcgccagcttccagaaggcgatctcccccagctcttcaagaatcgttttggtgtaatccgcctcacccacactaacaccgccggaactgatcaccacatccgcctggctgtcggcttcaataaatgcggcgcgcagggcatggggatcgtcgcggataatccctaagttaattacctcgcatcccaactgttctaacatcaggtgtacggcgagacggttggtatcgtagatttggccgtcgcccagcggctgaccgggcaactggagttcatcaccggtagaaaaaagcgctacacgcactttacgaatcaccggaacttcggcaatccccagactagcaattactggcagctctgcggtagtcaggcgagttcccgccgggaaaacaaccgcacctgcagagatatcttcaccgcgacggcgaatattttgcccgctacgcacttcagcagtaaaacgcacgccattgtccatttgttcagtctgctcctgcatcaccaccgcttcgcagccttccggcaccggcgcaccggtcataatacgaatgcaggtacccgcaggccattcaccatggtatggctgaccggcaaaggatttaccggcaacgggcagcggttgcccggaggcaatatcggctaaacgcaccgcgtagccgtccattgcggagttatcaaaccccggaacatcaagcgggctaacgacatcgctcgccagaatacgaccaaaacactgtaccagtggcagcgtttcctgggcggtcagtggggtgacgcgagaaagcatctcattaagcgcggtgtcgaggctcatcaatccggtggtaaattccatgaaaacactcctgcggaggcaaaatcgaatttgcctattatgtcagaaaaacgccacagactgtatgccacctcgggcgtagcgctgggtcctgcctttacatgccatatccatctttctatattcaaaaattgaatgagtaattcataaaaattctgatatttatagcaaaagtggcgaaccacccttaatggacgaatactatgggcaaagcagtcattgcaattcatggtggcgcaggtgcaattagccgcgcgcagatgagtctgcaacaggaattacgctacatcgaggcgttgtctgccattgttgaaaccgggcagaaaatgctggaagcgggcgaaagtgcgctggatgtggtgacggaagcggtgcgtctgctggaagagtgtccactgtttaacgccggaattggcgctgtctttacgcgtgatgaaacccatgaactggacgcctgtgtgatggatggtaacaccctgaaagccggtgcggtggcgggcgttagtcatctgcgtaatccggttcttgccgcccggctggtgatggagcaaagcccgcatgtgatgatgattggcgaaggggcagaaaattttgcgtttgctcgtggcatggagcgcgtcagcccggagattttctccacgtctttgcgttatgaacaactactggcagcgcgcaaggaaggggcaaccgtcctcgaccatagcggtgcgccactggatgaaaaacagaaaatgggcaccgtgggggccgtggcgttggatttagacggcaatttggcggcagccacgtccacaggcggaatgaccaataaattacccggacgagttggcgatagtcccttagtgggtgccggatgctacgccaataacgccagtgtggcggtttcttgtaccggcacgggcgaagtcttcatccgcgcgctggcggcatatgacatcgccgcgttaatggattacggcggattaagtctcgcggaagcctgcgagcgggtagtaatggaaaaactccctgcgcttggcggtagcggtggcttaatcgctatcgaccatgaagggaatgtcgcgctaccgtttaacaccgaaggaatgtatcgcgcctggggctacgcaggcgatacgccaaccaccggtatctaccgtgaaaaaggggacaccgttgccacacagtgatgaacttgatgccggtaatgtgctggcggttgaaaatctgaatattgcctttatgcaggaccagcagaaaatagctgcggtccgcaatctctcttttagtctgcaacgcggtgagacgctggcaattgttggcgaatccggctccggtaagagtgtgactgcgttggcattgatgcgcctgttggaacaggcgggcggtttagtacagtgcgataaaatgctgttgcagcggcgcagtcgcgaagtgattgaacttagcgagcagaacgctgcacaaatgcgccatgttcgcggtgcggatatggcgatgatatttcaggagccgatgacaagcctgaacccggtatttactgtgggtgaacagattgccgaaagtattcgtctgcatcagaacgccagtcgtgaagaagcgatggtcgaggcgaagcggatgctggatcaggtacgcattcctgaggcacaaaccattcttagtcgttatccgcatcaactctctggcgggatgcgccagcgagtgatgattgcgatggcgctgagttgccgcccggcggtgctgattgccgatgagccaaccaccgcgctggatgtcactattcaggcgcagatcctgcaattaatcaaagtattgcaaaaagagatgagcatgggcgttatctttatcactcacgatatgggcgtggtggcagagattgccgatcgggtactggtgatgtatcagggcgaggcggtggaaacgggtaccgtcgaacagatttttcatgcaccgcaacatccttacacccgtgcgctgttagctgctgttccgcaacttggtgcgatgaaagggttagattatccccgacgtttcccgttgataagccttgaacatccagcgaaacaggccccccccatcgagcagaaaacggtggtggatggcgaacctgttttacgagtgcgtaatcttgtcacccgtttccctttgcgcagcggtttgttgaatcgcgtaacgcgggaagtgcatgccgttgagaaagtcagttttgatctctggcctggcgaaacgctaagcctggtgggcgagtctggcagcggtaaatccactaccgggcgggcgttgctgcgcctggtcgaaagccagggcggcgaaattatctttaacggtcagcgaatcgataccttgagtcccggcaaacttcaggcattacgccgggatattcagtttatttttcaggacccttacgctagcctggacccacgtcagaccatcggtgatagcattatcgaaccgctgcgtgtacacggtttattgccaggtaaagacgcggctgcacgcgttgcgtggttgctggagcgcgtgggcctgttacctgaacatgcctggcgttacccgcatgagttttccggcggtcagcgccagcgcatctgcattgctcgcgcgttggcattgaatccaaaagtgatcattgccgacgaagccgttagcgcgctggatgtttctattcgcgggcagattatcaacttgttgctcgatctccagcgtgatttcggcattgcgtatctgtttatctcccacgatatggcggtggtagagcggattagtcatcgtgtggcggtgatgtatctcgggcaaattgttgaaattggtccacggcgcgcggtcttcgaaaacccgcagcatccttatacgcgtaaattactggcggcagttccggtcgctgaaccgtcccgacaacgaccgcagcgtgtactgctgagcgacgatcttcccagcaatattcatctgcgtggcgaagaggtggcagccgtcagcttgcaatgcgtcgggccggggcattacgtcgcacaaccacaaagtgaatacgcattcatgcgtagataacattcaggcggagaataaaatggcaagagctgtacaccgtagtgggttagtggcgctgggcattgcgacagcgttgatggcatcttgtgcattcgctgccaaagatgtggtggtggcggtaggaagcaatttcaccacgctcgatccgtatgacgcaaatgacacgttatctcaggccgtagcgaaaagcttttaccaggggctgttcggtctggataaagagatgaaactgaaaaacgtgctggcggagagttataccgtttccgatgacggcattacttacaccgtgaaattgcgggaaggcattaaattccaggatggcaccgatttcaacgccgcggcggtgaaagcgaatctggaccgggccagcgatccggcgaatcatcttaaacgctataacctgtataagaatattgctaaaacggaagcgatcgatccgacaacggtaaagattaccctcaaacagccgttcagtgcgtttattaatattcttgcccatccggcgaccgcgatgattagtccggcagcgctggaaaaatatggcaaggagattggtttttatccggtgggaaccggaccgtatgaactggatacctggaatcagaccgattttgtgaaggtgaaaaaattcgcgggttactggcagccaggattgcccaaactggacagcataacctggcgtccggtggcggataacaacacccgcgcggcaatgctgcaaaccggtgaagcgcagtttgctttccccattccttacgagcaggccacactgctggagaaaaacaaaaatatcgagttgatggccagtccgagtattatgcagcgttatatcagtatgaacgtgacgcaaaagccgttcgataacccgaaggtccgtgaggcgctgaattacgccattaaccgtccggcgctggtgaaagttgcctttgcgggctatgcaacgccagctactggtgtggtaccgccaagtatcgcctacgcgcaaagttataaaccgtggccttacgatccagtgaaagcgcgcgaattactgaaagaggcgggatatcccaacggtttcagtaccacgctgtggagcagtcataaccacagcaccgcgcagaaagtgctgcaatttacccagcagcagttagcgcaggtcgggattaaagcccaggtgactgcgatggatgccggacagcgggcggcagaagttgaaggtaaagggcaaaaagagagcggcgtgcggatgttctacactggctggagcgctagtaccggcgaagcggactgggcactaagcccgctgtttgccagccagaactggccaccgacgctgtttaataccgcgttttacagcaataaacaggtggatgacttcctggctcaggcactgaaaactaatgatccggcggaaaagacccgcttatataaggcggcgcaggatatcatctggcaagaaagcccgtggatcccgctggtggtagaaaaactggtgagcgcacacagtaaaaacctgaccggtttttggatcatgccagacaccggcttcagctttgaagacgcggatttgcaataagcaacgcagggagtggaatgcttaattacgttatcaaacgcttactggggttgattccgacgctgtttatcgtcagcgtgctggtgtttttatttgtccatatgctgcccggcgatccggcgcgattgattgccgggcccgaagctgatgcgcaggttatagaactggtgcgtcagcagctggggttggatcagccgctgtatcaccagttctggcactatatcagcaatgctgtgcagggggattttggcctgagcatggtgagccgtcgtccggttgccgatgagattgccagccgctttatgccaacgctgtggctgaccataaccagtatggtctgggcggttatatttggtatggcggcgggaattatcgccgccgtctggcgtaaccgttggccggatcgattgagtatgaccattgcggtgagcgggatcagctttccggcatttgctctggggatgcttttaattcaggtattctccgttgaactgggctggctgcctaccgtgggagcagacagttggcagcactacattttaccctccctgacgctcggcgcggcagtggccgccgtgatggcgcgctttacccgcgcgagctttgtcgatgttttaagcgaagattatatgcgtaccgcgagggcgaaaggggtgagcgaaacctgggttgtcctcaaacacgggctacgtaacgcgatgatcccggtagtgaccatgatgggcttacagtttggctttttgctcggtggttccatcgttgtggagaaagttttcaactggccgggacttggacgcttactcgttgactccgtagaaatgcgtgattacccggtgattcaggcggaaattctgcttttcagcctggaatttattcttatcaacttagtggtggatgtgctttacgccgccattaacccggctatcaggtacaagtaaggatgcgactatttaactggcgacgtcaggcggtgttaaacgccatgccactggtcaaacctgaccaggtacgtacaccgtggcatgaattctggcgacgatttcgccgtcagcatatggcgatgaccgccgcattattcgttattttattgattgtggtggccatttttgcacgctggatcgctccctatgacgccgaaaattattttgattatgacaatctgaataacggaccttctttgcagcactggtttggcgtcgatagtctggggcgtgacattttcagccgtgtcctggttggtgcgcaaatcagcctggcggcgggcgtgtttgccgtgtttatcggtgcggcgatcgggacgttgctgggcttgctcgctggatattatgaaggctggtgggatcggctgatcatgcgcatttgcgatgtgctgtttgccttcccgggtattttactggcgatcgctgttgttgcggtgttgggaagcggcattgctaacgtgattattgcagtcgccattttttccatccccgcgtttgcccgcctggtgcgcggcaacacgctggtgttgaaacagcaaacctttattgagagtgcacgcagtattggtgccagcgatatgaccgttttgttgcgtcatatcctgcctgggaccgtctcttctatcgtggtgtttttcaccatgcgcattggtaccagcattatctctgccgccagcctcagttttctcggcctcggtgcgcagccgccgacaccagagtggggagcaatgctcaatgaggctcgagcggatatggttatcgcgccgcatgtcgctgtttttccggccctggctatttttctgaccgtactggcgttcaatttgttgggcgatggtttacgcgatgcgctggatccgaaaattaaaggataattacgtttgaatattgcttgaaagggtaatcacctcacaggaaattattgccctaagcaagtgttgtaactttctgctgattttgtagaatcgggtaatttggttaaaaagccgcagcaagggacaatttttgcagcggcacagcgttcagatagttattttgttaaatgtattaacatgctgagtttatacgaaaagataaagataaggctgataattttatttttattggcagcactgagttttattggtctttttttcatcattaactatcaactggtaagcgagcgcgcggtaaaacgtgccgatagccgctttgaacttattcagaaaaacgttggctatttctttaaagatattgaacgtagcgccctgacattaaaggacagtctgtatttattaaaaaatacagaggagattcaacgcgccgtgattcttaaaatggaaatgatgccatttttagacagcgtgggactggtacttgatgataataaatattatctttttagccggagggcgaatgataaaatcgttgtttatcatcaggaacaagtaaatggaccgcttgtcgacgagagtgggcgggttatttttgccgattttaacccaagcaaacgaccgtggagcgtggctagtgatgactctaacaacagctggaatccggcatacaattgctttgatcgtccgggtaaaaaatgtatctcttttacgctacacatcaacggcaaagatcacgatttgttagcggtggataaaattcatgtcgatttaaactggcgatatctgaacgagtatcttgatcaaatcagcgctaatgatgaagttctatttttgaaacaaggccatgagatcattgccaagaatcaactcgctcgtgaaaaactgattatttataatagcgaaggtaattataatattattgattctgtcgatactgaatatatcgaaaaaacaagtgcggtgccaaacaacgcattattcgaaatctatttttattatcctggcggtaatttattgaacgcaagtgataaacttttttatctgccgtttgcgttcattattatcgtattgctggtggtttatttaatgaccactcgtgtgttccgtcggcaattttctgaaatgacagagctggttaatacgctggcgtttttgcctgacagtacggatcaaatcgaggctctgaaaattcgtgaaggcgatgcgaaagagattatcagcatcaaaaatagcatcgcggaaatgaaagatgccgaaattgaacggagtaataaattgctcagtctgatctcttacgatcaggaaagtggttttattaaaaatatggcgattattgagtctaacaataatcagtatctggctgtggggatcatcaaactgtgtggtctggaagccgtggaagcggtgtttggtgttgatgagcgcaataaaatcgtcaggaaattgtgtcagcgaattgccgagaaatatgcgcaatgctgcgatatcgtgacattcaatgccgatctctatttacttctgtgtcgggaaaatgtacagacatttacccgtaaaatagcgatggtaaacgattttgacagcagctttggctaccgcaatctgcgcatccataagtctgccatttgtgaacctttgcagggggaaaacgcctggagttacgcagaaaaactgaaactggcgatttccagtatccgtgaccatatgttcagtgagtttattttctgtgatgacgcgaaactcaacgaaatagaagagaatatctggattgcgcgtaatattcgccatgcaatggaaattggcgaactattcctcgtctatcaaccgatcgttgatattaacacccgcgccattctgggcgcggaggcgttgtgccgttgggtgtctgcggagcgggggatcattagtccgctgaagttcattaccattgctgaagatatcgggtttatcaatgagctgggttatcagattattaaaacggcaatgggtgaattcagacattttagtcagcgtgcgagcctgaaggatgatttcttactgcatattaatgttagcccctggcagttaaacgaaccacactttcatgagcgttttaccaccatcatgaaagaaaatggcctgaaggcgaacagcctctgtgttgagatcactgaaaccgtgatcgagcgaattaatgaacatttttatctcaatattgaacaactgcgtaaacaaggggtacggataagcattgatgactttggcaccggtttgagtaacctgaaacgtttttatgaaattaatccagacagcataaaggtggacagccaattcaccggcgatattttcggtactgcgggaaaaattgtgcgcattattttcgacctggcacgctataaccggatcccggtgattgcggaaggcgtagagagcgaagacgttgcgcgcgaattaatcaaattaggatgtgttcaggctcaggggtatctgtaccagaaacccatgccattctccgcctgggataaaagtggaaaattagtaaaagagtaatttacgtatgtccagaatcaataagttcgtacttacagtcagtctgctgatttttatcatgattagtgcagttgcctgcgggatctacactcaaatggtaaaggaacgggtgtatagcctgaaacagtccgttattgatactgcttttgcggtggcaaatattgctgaatatcggcgtagcgtggcaattgatcttatcaacacgctaaatcccacggaggaacagctgttggttggtttgcgcacagcttacgccgacagcgtttccccctcttatttgtacgatgtcggtccttatctgatttccagtgacgaatgtattcaggtaaaggagttcgagaaaaattattgtgcagatattatgcaggttgtgaagtatcgacatgtcaaaaatacagggtttatctcttttgacggtaaaaccttcgtctattacctctatccggtaactcacaatcgtagtctgatatttttgcttggtctggagcgtttttctttactgagtaaaagcctggcgatggacagcgagaacctgatgttctctctatttaagaacggtaaaccggtgaccggtgatgaatataatgctaaaaacgccatcttcaccgttagcgaagcgatggagcacttcgcctatttgccgaccggattgtatgtatttgcgtataaaaaagatgtttatttgcgggtttgtacattgattattttctttgccgcattggtggcagtgataagcggtgccagttgcctctatctggtacgcagagtgattaatcgtggtattgtggagaaagaagccatcattaataaccattttgaacgcgtactggatggcgggcttttctttagcgctgccgatgtcaaaaaactctacagtatgtataacagcgcgttcctggacgacctgaccaaagcaatgggcagaaaatcctttgacgaagatttaaaagcgctgccggaaaaaggcggttatttgtgcctgtttgacgtcgataaattcaaaaacattaacgacaccttcggtcatttgctgggcgatgaagtgttgatgaaagtggtgaaaatccttaaaagtcagatcccggtagataaaggtaaagtctaccgcttcggcggtgacgaatttgcggtgatttatacgggtggaacgctggaagagttgctaagcattctaaaagaaatcgttcatttccaggtgggaagcattaatttaagtaccagtatcggtgtagcacatagtaatgaatgtcctaccgtcgaacgcttgaaaatgctggcggatgagcggctgtataagagtaagaaaaacggcagggcacagattagctggcagtaatcattattcgcaggccggacaaatgattttgcccggcctgaattaattaaacccggctaccccacaaatcgtactcatcggcgtgctcgactttcacacgcaggatatcacccggcttaacgttggtttcaccattgagataaaccgcgccgtcgatttccggtgcatctgccatgctgcgaccaatcgcgccttcttcgtccacttcgtcgataatcaccagaatttcacggcccactttctcttgcaggcgctcggcggaaatctgctgctgcagctgcatgaaacggttccagcgttcttctttaacttcttccggaacctggtcaggcagggcattggcgtctgcaccttcaaccgggctgtatttaaagcagccaacgcgatccagacgcgcttctttcaggaagtcgagtagcatctggaaatcttcttctgtctcgccagggaagccgacaataaaggtactgcgtagggtcagttccgggcagatttcgcgccactgtttgatgcgcgccagttggcgatctacagaacccggacgcttcatcagtttgagaatgcgcgggctggcgtgctgcaacggaatgtccagatacggcaggattttgccttctgccatcagtgggatgacgtcgtccacatgcggataagggtaaacgtagtgcagacgtgtccagatccccagtttgcttaactgttcgcacaggctgaccatgctggtttttaccggctcgccgttgtggaagccagtacgatgtttaacatcaacgccataggcggaagtatcctggctgatcaccagaatctctttaacgcccgcatctaccagacgtttcgcttcacttaacacttcgccaatcggacggctcaccaggtcgccgcgcatagacggaataatgcagaaggtgcagcggtgattacagccttcagaaattttcagataggcataatgacgcggcgtcagtttcacaccttgttctggcaccaggctcaggaatgggttgtgtttcggttttggcacgtagtgatgaacgtgctccagaacctgctcatagctatgaggcccggtgatttccagcactttcgggtggacttcgcggatctgatcttcttttgcccccagacaaccggtcacaataaccttgccgttttcattcaacgcttcaccaatggcttccagactttcttgtaccgcgctgtcaataaagccgcaggtgttgacgatcaccatgtccgcatcgtcatagctcggtaccacgtcataaccttcagtgcggagttcggtgagaatacgctcactatcaacaaggtttttcggacagccaagggaaacaaagccgattttcggctggggagttactttgctcatagcttaaaaaatattcagttacaggaaaggtcagggcagggattctacagagttctggataaaatttgtatcgcaatctcattcgctggcggaggcgaaggaaatgtaaattttgttaattcggcgtgaagaattgatcctggacagcattttgctcaaaaaatagccatactatttaattgcaacaaggctgggaagaggaggatcgaagtatgttcgttgacagacagcgaatcgatctgctgaaccggttgatcgacgcacgcgttgacctcgccgcatacgtgcaactgaggaaggcaaaaggatacatgtccgtcagcgaaagcaatcatctacgagataacttttttaaactgaatcgcgaactgcacgataaaagcctgcggttgaatcttcatctggatcaggaagagtggagtgctcttcatcatgctgaagaagcattagcgacagccgcagtatgtttgatgagtgggcaccatgattgcccgactgttattaccgtcaacgccgataagcttgaaaattgtctgatgagcttaacgctgagtatccagagcctgcagaagcacgccatgcttgagaaggcctgaaaactaagggggagaaagcgtctcccccttcatgtttaagtttttgtaaaaatgaatttgttatctcctccactgactacgctttaagccagagtcaatccggaggcgttatgcatcgacaatcctttttccttgtgccccttatttgtctttcttccgctctctgggcggctcctgcaacggtaaatgtcgaagtactgcaagacaaactcgaccatccctgggcactggcctttttacccgataatcacggtatgttaatcactctgcgcggcggcgagttgcgtcactggcaagcaggaaaaggattatctgcgccgctttccggagttccggacgtttgggcgcacgggcagggcggcctgctggacgtggttttagcgcctgattttgctcagtctcgccgcatctggttaagttattccgaagttggcgatgatggcaaagccggaactgctgtgggttatggccgcttaagtgatgatctcagtaaagtgaccgacttccgcaccgtctttcgccagatgccaaaactgtctaccggcaaccattttggcgggcggctggtattcgacggtaaaggttatctttttattgctctgggcgaaaacaatcagcgcccgacggcgcaggatctggataaattacagggcaaactggtgcgtctgaccgaccagggcgaaatcccggatgataatccttttataaaggaatccggtgcgcgcgccgagatctggtcttatggcattcgtaatccgcaaggaatggcgatgaatccgtggagtaatgcactgtggctgaatgaacatggcccgcgcggtggtgatgaaattaatatcccgcaaaaaggcaaaaactacggctggccgctggcaacctggggaatcaactatagtggctttaagataccggaagcgaaaggggagatcgtcgccgggaccgagcaacctgttttttactggaaagatagccccgctgtgagcggcatggccttctataacagcgataaattcccccagtggcagcaaaaattatttattggcgcgctgaaagataaagatgtcattgtgatgagcgtcaacggcgacaaagtgacagaagatggccgtattttaacggacagagggcagcgaattcgtgatgttcgcactggacccgacggttatttatacgttctcaccgacgagtccagtggggaattacttaaagttagcccacgcaattaactaacgggaatcatcaccactttgcgcactgcggggcgttcagtgagttgctgataccagcgttgcagatttggacgcggtgtccaggtcaggccaacgttaaacaaattgtagatgaacggtgcgatagcgatatcgcccacaccaaactcgtcgccagagaaccattttacttttgccagttccgcatcgagcagggcaaacagggcgtcgcactctttgcaactggcatcaatggcggcctgatcgcgctcttccggtggtgttctgactaatcccatcaggatcccgcgatgagcattactgagcgtctggtttgcccagtccatccatttttccgcttccgcacgacgtgccggactgtcgatccacaggcgtttttgcccgtactgtgccgccagatagcggacaatggcgttactttcccaaagaatgagatcactttcgtcgtcacgcaacaacggcaccagcccgttagggttcatcgccagaaaatcagcatcgtgatttatcccaaactcacggcccgcgagaatttgctcataaggtagttccagttcttcgagcgtcagcaatactttttttacgttagtactattattccgaccccacagcgtaatcatactcaccccttttccgacaggcagccacaggctgaacaggactccgatggtgaagtaaagttaacttttaagcaacagctggcaaaaaaatgacaccagaagcagcgaagcggcaggatattgcataaactttaaaaactttaccaacttacggtttctttaagtttgtgtgtgcgttattaatcaccaaacttatcatacggcgatataacgtattttttttgaatggatactcgggtggcatttatgacgcaatactcctctctccttcgtggtcttgcagcgggttctgcatttttattcctttttgccccaacggcattcgcggcggaacaaaccgttgaagcgccgagcgtggatgcgcgtgcatggattttaatggattacgccagcggtaaagtgctggcagaaggcaatgcggatgagaaactggatcccgcgagcctgactaaaatcatgaccagctatgtggttgggcaggcgcttaaggccgataagattaaactcaccgatatggtgacggtcggtaaagatgcctgggcgacgggaaatccggcactgcgtggtagtagcgtaatgttcctcaaaccgggcgatcaggttagcgtggcagacttgaacaaaggtgtgattatccagtccggtaatgacgcctgtattgcgctggctgattacgttgccgggagccaggagagttttattggtctgatgaatggttatgccaaaaaactgggtctgaccaacactaccttccagacggtgcacggcctggatgcgccggggcagttcagcaccgcgcgcgatatggcattgctgggtaaagcattgatccacgatgtgccggaagagtacgccattcataaagagaaagagttcaccttcaacaaaattcgtcagcctaaccgtaaccgtctgctgtggagcagcaatctgaatgttgatggcatgaagacaggaaccacggcaggcgcgggatataatctggttgctagcgctacccagggcgatatgcgtttaatctccgtagtgttgggggcgaaaaccgaccgtatccgttttaatgagtctgagaaattattgacctggggtttccgcttctttgaaaccgtgacgccaattaaacctgatgccacctttgtgactcagcgcgtctggtttggtgataagagcgaagtgaatctcggggcaggtgaagcgggcagtgtgaccataccgcgtgggcagctgaaaaacctgaaagcgagttatacgttaacggaaccgcagcttaccgcaccgctgaaaaaaggtcaggttgtcgggaccattgatttccagcttaacggtaaatccattgagcagcgtccgctgatcgtgatggaaaatgtggaagagggcggattctttggtcgggtgtgggatttcgtgatgatgaaattccatcagtggttcggcagctggttctcttaatcttctgataaccggatggcgcgaaacgtcatccggttatacgtcattaatacatcaacttaatgcgctgcgtctgcgcgtacttcacatactcatcttccgggcaacaatcgctcaccacaatatcaaagcgtttcaggtcacccatgcgcgccggacgcaccttgccaaatttactgtggtcgacaaccagcacatgcttttgcgccatgctcatggcccagtgttttaccggcaactcttcaagattaaaacaggtagcgcctttactgacatgcacgcccgccgcagaataaaaagcgatatccgggcaaaaattattcagcgtttgctgaaaatcgatgggtttgaaaatggcgttgctggcgtgaaattcaccaccgcaaagaaacgcgcggcaatggggtttctctttcagcgccagaaaggtatttaggctataacaaacggcggtaaaagggatttcattatcaatcgcttcaataatccacggcgtggtggtgccacagtcaaaaaagagggtctgatcgggttctaccagcgtcgcagccagttttgccgcccggcgtttttcttccaccaggcgggatttttgatcgcttaacaggtaatggctggcactgcgcggttccagaacaatatagccgccgagcaaaacgacgggcgcactgtggttgttcagatcgcgacgaatcgtcatctcgctaaccccaagcagggcggcggcgtctttaagatgtaacttatcgctgcgttttaattcttgcagcagctgcccgatacgctcttcgcgacgtgtttccataatccctctgaatagttattgaagcgagccgctcaatactacactttttagcagagatcagtcacgcacccagcctttgcggatcggtaatgcaaaacagacgcgataccagctttgcagacgttgatagagtttatgccccatcgcttgccagataatctgggcactaaggcagccaatcatacctgccagcaatccaccgagcatatccagcggccagtggacgccaagataaacgcggctccaggcaatgacgacggccagcaccattaaaagactgccggaccacaggcgatgccagcataaaaatgccagtgcaaaggtgaaaatcaccgtaccgtgatcgcttgggaaactgtcatccgccgcatgatgcaggaagttatagccgatattttcgacaaagggtcggtcgtgcggaaaaagatgtcccatcgtccaggacacaaacaggctgaccgccagcgcgatagcgatttttatcaccagttgccgttgtgctgtaagcccccacaaccaaagtaccacggccagcaacggcaccacggtaatcaaatctttagcaataaaaatcgccaagctgatcatccacggagcgctgtctggcgtcgcgttaataagagagaatagagagagattcaaattttccagcataacttcccgacgcaaagtgattaaaagggagccaatacaggcaagtcgttgagaataaagtgcaggttaaactgggtaaagcggcatcgtcttatttccctcaagcggcctgtttacggtgggtgattgtaacgggcataggttaaataaaacttaaagaaagcgtagctatactcgtaataatgtaagaatgtgcttaaccgtggtttcagctacaaaattcgctttctcgttagctgcgcttttattaaactctgcgcgattattattggcgaagaaattgcatgcaaaataaattagcttccggtgccaggcttggacgtcaggcgttacttttccctctctgtctggtgctttacgaatttagtacctatatcggcaacgatatgattcaacccggtatgttggccgtggtggaacaatatcaggcgggcattgattgggttcctactagcatgaccgcgtatctggcgggcgggatgtttttacaatggctgctggggccgctgagcgatcgtattggtcgccgtccggtgatgctggcgggagtggtgtggtttatcgtcacctgtctggcaatattgctggcgcaaaacattgaacaattcaccctgttgcgcttcttgcagggcataagcctctgtttcattggcgctgtgggatacgccgcaattcaggaatccttcgaagaggcggtttgtatcaagatcaccgcgctgatggcgaacgtggcgctgattgctccgctacttggtccgctggtgggcgcggcgtggatccatgtgctgccctgggaggggatgtttgttttgtttgccgcattggcagcgatctcctttttcggtctgcaacgagccatgcctgaaaccgccacgcgtataggcgagaaactgagtctgaaagaactcggtcgtgactataagctggtgctgaagaacggccgctttgtggcgggggcgctggcgctgggattcgttagtctgccgttgctggcgtggatcgcccagagcccgattatcatcattaccggcgagcagttgagcagctatgaatatggcttgctgcaagtgcctattttcggggcgttaattgcgggtaacttgctgttagcgcgtctgaccagccgccgcaccgtacgtagcctgattattatgggcggctggccgattatgattggtctattggtcgctgctgcggcaacggttatcagtagccacgcgtatttatggatgactgccgggttaagtatttatgctttcggtattggtctggcgaatgcgggactggtgcgattaaccctgtttgccagcgatatgagtaaaggtacggtttctgccgcgatgggaatgctgcaaatgctgatctttaccgttggtattgaaatcagcaaacatgcctggctgaacgggggcaacggactgtttaatctcttcaaccttgtcaacggaattttgtggctgagcctgatggttatctttttaaaagataaacagatgggaaattctcacgaagggtaaaaaaatgcctgactgctttgtgcgatcaggcattctcgaattaatggtgatggtcgtcaatctggtgttcgataaccatcccttcacctacgctggcaagatggcgaacataaggatgcgggcggtaagccggagctggcgcaggagccacatagacggtttgcggcacagtcgcgacgctgaccgcttgtggaacgctgacactatcaggaaccacaaccactttgtatccactcggcacatcgacggtgacactttgcgccatcgccacaccagtaaagcccattaaaagcgcgcccaacagtagacaatttttcataatcatttcgcctgaaataatgcagcgggttaatttccgcgaattatgcagccttcattcaggcattgtgttgccgggcgtgctgccggttttattggtcaaatggcgcttcgtgtttaagaactttatcgatcacatccagtacgccttcacggttattggagcctgcgcggtattttgccgctgcgacgaccgcgctaccggcattttccattgcaaaactaaagcctgcctgacgcagcatctcaatatcgttaccgccatcgccaaagaccaccacttcgctgtcgtctattccccataatttctgcagttggcgaaggccattggctttatgtacgccggggataatcagatcgatgctgccgttgccggtgtggacgctcaccataatatcgccgatggcctcatgtaatgctttttgtacttgtggaatcagttcatcggaaagattcaggccaaacttaaagaagatatcctctaagttgtcaaagttatcgacgtattccagacggtgataatacatttccgccaccgttttcatggcatcgtcatattttttgagtgtataggcactattttttccgcaggcaataatttccacttccgggcgcgtcagcaaatgttccacgacagtagcaaacgcatccttgcttagctcgccattaaaaacatctttgccttcgctcactacccagccgccgttttcagccacaaaggcaatttcattagcaatttcagggaagaaagagatcaactgataatattgattcccgctggcgactacaaagcgaattccttgtgctttcatttgctgatactgagccataaaccgctcacggttataggttttttgatcgcttaagaaagtaccatccatgtctaccgcaattaatttaatgctcatcaactattctccatcgccgtctgcgttttggtatcgggtttggcgacggctttcgcgacaatagccgcgagaataaccagcgccagtacaaccagcattgcactacgtaatccataatgttcgccgagatagcccagcagcggcggcccgacgaggaaagccagataaccggtcgttgctaccacactgacgcgggttggtgcatcggggccggtatcgctggcggcagaaatggtcagcgggaagcccaggctggcacccagtccccagagtacaacagacaccccagcgacccaggcgctatcgacaaaaataatcagcccaatacccaacgcccccattagtgcactggcccgaaccacggcaacgcgactgtaacggtcgatgaaccaaccgccggtgaagcgtccaacggtcatccccagggtaaaaccggcataaatcaggctgccggaagtagggctaaaaccgtgaccgtcaaccattaataagggtaaccagtcgttggcagaaccttcggcaaaggccatcgccagcaccacaacacctatcagcagcaactggatatcgcgataaaaaggtacgcctttttcgccatgctgggtgccatcggcagcatttttgcccgtaccgtcagggattgcctgaatggcgatataaataggtgcgatacctaccagcgccgccaataaaatgtgcaccgttgccggaacgccaaaggccgtcagtgccatcccgacacctgcgcctgccagcgtgcccaggctataaaaaccgtgcatcatcggcaaaaccgtcttattcatttctcgctcaacggcagcaccttcaacgtttatcgccacttccgcagaaccaaaacttgccccaaagacgccgagaccaacggcaaagagcagggggcttgtcagccagagtgccagacttaatatcatcatcccgatcaatgcgcaggacatcgtgaccaggatgacattacgtgtcccaaagcgtttcactaaccacgcgctgcagagaataccgctcatgctaccgatgctcagaccaaagagaacaccgcccatttcagcgatgctgacagagagaatatcgcggatagcaggcgtacgggttgcccaggacgccattaacaggcctggcaaaaagaagaacataaacagcgcccaggttcggcgtttcaatgcattacgactagaatttacggtcatagatcacgtcaaaataagaagagggaagacaacattagcaaggttgtgtacatttgtacacaattgcagagagaggaaatgacatgcgtcgcgctaacgatccgcaacggcgagaaaaaattatccaggccacgctggaggcggtgaaactttacggaatacatgctgttacgcaccgcaaaattgctacccttgccggggtaccgttgggaagcatgacctactattttagtggaattgatgagttgttactggaggcgttcagcagttttactgagatcatgtcccggcaatatcaggcattttttagcgatgttagtgatgctccgggcgcatgccaggctatcaccgatatgatctacagcagtcaggttgcaacgccggataacatggagctgatgtaccagctctacgcgctggctagccgaaaaccgctattaaaaacggtaatgcaaaactggatgcagcgcagtcagcaaacgctcgaacaatggtttgaacccggaaccgcccgcgcgcttgatgcgtttattgaggggatgacgctgcattttgtcaccgaccgtaagccgctaagccgcgaggagattttgaggatggttgagagggttgcagggtaatagataagttttagataacaaaaaacccatcaaccttgaaccgaaatggcggggttgatgggctccacaaaatggggacatcaaagaaaagcagtggcactaattaagactgatgccctgcggaaaagttctgcggttgtgcaaaaaaatttcattttcagggcaacttcagttttatcctaatcctggccataccatgacgatgattgtccctgccagcgtcagcaggacgttggcgattgcataggtgcccgcatagcccagcgccgggatgttactgcgagctgtatcactgatgatctccattgccggcgcgcaggtacgtgcgcccatcattgcgccgaacaacagcgcgcggttcattcgcaatacataagcaccgaacaagaaacagataaccacgggcaccagactgacaatcaatccggcaatcaacatctgaccgccaatcgcgcccaggccgttattaataccgctaccggcgctcagaccaacgcctgccataaacaccatcaagccgaactctttcaccatgcttaatgcaccctgcggaatgtaaccgaaggtcgggtggttagcacgcataaagcccagcataattccggcgaataacaacccggcagcgttccccatgccgaaactgaatgtgctgaactggaaggtgatcatcccgatcatcagcccaataacaaagaaggcgcagaatgccagcaggtcagtgacctggctgtgaatgctgataaagccgatgcgatcggcgatggtttttacgcggcgggcatcgccgctgacttgtaaaacgtcacctttgttaagcacgacgttgtcatctatcggcatctcaatctggctacgaatgacgcggttaaggaagcaaccgtgatcggtcaacttcagttgtgcgagacgtttacctacagcgttatggtttttaacgaccacttcttcagtgacgatacgcatgtcgagaaggtcacgatcgaaaacttctttaccgttacggaagctgggatcgagtcgggcatgggcgtcgggatagcctaccaacgctatttcatcgcccatttgtagcacggcatcaccgtctggatttgccagaatcccgttacgtcgaatacgttcaatgtagcagccggtttgtcgataaatacccagttcacgcagatttttgccgtcggtccaggccaccagttccgggccgacgcgataggcgcggatcaccggtaaataaaccttacggttggcatcagtgtccaggccacgttcgcgggcgatttgctgggcgctggtctgtaagtcctgatgctgcaatttcggcaagtaacgcgcaccaacaatcaaactcaccagaccgattaaataggttaaggcatacccgaggctcagattatccagtgccagactgagctgcctgctttccatgccggaatgacgcagtgtatcgccagcaccgaccagaaccggtgtgctcgtcatagagcctgctaacataccggccgtcaggccaatatcccagccaaacagcttacctaaccctaaggcgatcaccagcgcactgccaaccatcaccagtgctaacattaggtaatttttcccatcgcgaaaaaaaatggaaaaaaagttcggtccggcttcgaccccgacgcagaaaataaacagcataaagccaagattaagcgcatcggtgttaatgctgaaatgttgttggcctaataacaggcttacgactaaaacgccaatggaattacccagttggatgctaccaagtcgtaactttccgagacatagcccaagcgcgaggaccacaaataataacagaatgtaattcccatttaacaattcggcgacgtttatattcacggaggctaacttcttgtttactagtaagctgttgaaagaaatggtaatttacgataatgttttttaccagaattcagggcgcagattcattcagcgcacctaaacgatagtaaagtaacaatatattttactagtgtaatcacattaggtatcaacggctatatgaattgcgttggcctatattagcatggaatgcgaagcggctttatcttactgaacgccacactggcgaaaaatgtgttcgatagacgcagtgtcaggaggaacgagtgaaacataaacaacgttgggcgggggcaatctgctgttttgtcctcttcattgtggtgtgcctttttctggcgacgcacatgaaaggcgcttttcgggctgccgggcatcctgaaatcggcttgctatttttcattcttcctggagcagtcgccagcttctttagtcagcgtagagaagtcctgaaacctctgtttggcgcaatgctggcggcaccctgtagcatgctcattatgcggctgttttttagtccgacgcgcagtttctggcaagagctggcatggttactaagcgcggtgttctggtgtgcgctgggggcactgtgtttcttatttatcagtagtttgtttaaaccacagcacagaaaaaatcagtaaagccctcaacgcgagggcttgtcagacgatcaggcgtccagattttctttcacccatgcagcaaaatcggtatagccgccgatatgttgctgatcgacaaaaatctgcggcacggtttctacgggtttacctgccttttgttgtagatcttctttagtgatcccttccgcacgaatatctacatactgatactgaaaatcatcgcgttcattgctcaatttctcagccagatcttttgcacgcacacagtaagggcaaccgctacgaccaaaaataacggtttgcattatttctctcctcatagatttatgcctgtaatgatcacgctaaaatgtattcgctgaaagtaggtttaacctgttgcattaattgctaaaagctataactgttaaacacaatacagtgaaaagttttagactgaaggctcactttgcagagggaagcgtatgcgcgcgatcggtaaattgcctaaaggcgtgttgatactggaatttatcggaatgatgctactggcggtggcgctgctgagcgtaagcgactccctgagcctgcctgagccattttctcggccagaagtgcagattctgatgatttttctcggtgttttgctcatgcttcccgctgcggtggtggttattcttcaggtggcaaaacgtcttgccccacagctgatgaaccgtccaccgcaatatagtcgtagtgaaagagaaaaagataatgacgccaaccattgaacttatttgtggccatcgctccattcgccatttcactgatgaacccatttccgaagcgcagcgtgaggcgattattaacagcgcccgtgcgacgtccagttccagttttttgcagtgcagtagcattattcgcattaccgacaaagcgttacgtgaagaactggtgacgctgaccggcgggcaaaaacacgtagcgcaagcggcggagttctgggtgttctgtgccgactttaaccgccatttacagatctgtccggatgctcagctcggcctggcggaacaactgttgctcggtgtcgttgatacggcaatgatggcgcagaatgcattaatcgcagcggaaagcctgggattgggcggggtatatatcggcggcctgcgcaataatattgaagcggtgacgaaactgcttaaattaccgcagcatgttctgccgctgtttgggctgtgccttggctggcctgcggataatccggatcttaagccgcgtttaccggcctccattttggtgcatgaaaacagctatcaaccgctggataaaggcgcactggcgcagtatgacgagcaactggcggaatattacctcacccgtggcagcaataatcgccgggatacctggagcgatcatatccgccgaacaatcattaaagaaagccgcccatttattctggattatttgcacaaacagggttgggcgacgcgctaaaaccgccacgtcgatgtatgatacgcgggcttttgaccaggtctgacagagaggtgcagggtgaaaattgccatattgtcccgggatggaacgctctatagctgtaagcggctgcgtgaagccgctatacagcgcggtcacctggttgaaattcttgatccgctttcttgctacatgaacataaatcctgcggcgtcttctattcactacaaaggccgcaagttaccccattttgacgcagtgatcccgcgtattggcaccgccattaccttttatgggacggcggcactgcgccagttcgagatgctggggagctatccgctcaatgagagcgtcgccattgcccgggcgcgtgacaaattgcgttccatgcaactgctggcgcgtcagggcatcgacctgcctgtcacgggcattgcgcatagcccggatgataccagcgatttaatcgacatggtcggtggtgcgccgctggtggtcaagttggttgaaggcacgcagggaattggcgtcgtgctggcggagacgcgtcaggcggcggaaagcgtgattgacgctttccgcggtctgaacgcgcatattctggtgcaggaatatatcaaagaggcgcaagggtgcgatatccgctgtctggttgttggcgatgaagtggtcgctgcgattgaacggcgggcgaaagagggcgattttcgttccaatttgcatcgtggcggcgcggcaagcgtcgccagtatcacaccacaggagcgtgaaatcgcgataaaagccgcgcgaacgatggcgctggacgttgctggtgtggatattctgcgtgctaatcgcgggccgttggtgatggaggtgaatgcgagcccggggctggaaggaatagaaaaaaccaccggtatcgacatcgcgggtaaaatgatccgctggatcgaacgccacgctacgacagaatattgcctgaaaacgggtggttaatcgcaatcacattactgatcatggttttgcctgcgctttttgcgtaagctgtgccggtctttttatcgaaagaggttgtacaaaattatgacaagcctggtcgttcctggtctggatacgctgcgtcaatggctcgatgacctggggatgagtttttttgaatgtgataactgtcaggctctgcatctgccccatatgcagaatttcgacggtgtctttgatgccaaaatcgatctgatcgataacacgatcctgttttctgccatggcggaagtccgacctagtgccgtattgccgctggcggcggatttatctgccatcaatgccagtagcctgaccgtgaaagcatttcttgatatgcaggatgataatctgccaaagctggtggtttgccagtctttatccgttatgcagggcgtaacctatgagcagtttgcatggttcgtgcgtcagagcgaagagcagattagcatggtcattcttgaagctaatgcccatcaactgctgttaccgactgatgatgaagggcaaaacaacgttaccgaaaactatttcctccactgataactcctttcgagcacgcagtcgctggtgcagtggctgcgcgctgcaaaattatctgctgtttttaaccttttcttaaagattatttcacttctcttgtgtcgatttggctttatcacatagagcaaatatgcataaaaatttgttaaataccgttttttaatccgagctatagtctcaaaccctggctaaagttattcttgcgatgcttttatatagcgagcagtgctggccgggagaaagttctcttttcttacaccgcgccgataaaaaatatgcacgtttattgcatatctttcagtgtgacaacttttgttcgtttgttaacgaactttcagaaggaaagagatatgaccgccttaaataaaaaatggctaagcggtctggttgcgggtgctctgatggccgtctctgtcggcacgctcgcggctgaacaaaaaacactccacatttataactggtctgattatatcgccccggacacggtggccaattttgaaaaagaaaccggtattaaagtcgtctacgatgttttcgactctaacgaagtactggaaggcaaattaatggccgggagtaccggctttgatctggtggttccatctgccagctttctggagcgccagttgactgcgggagttttccagccgctggacaaaagcaaattgccggagtggaagaatctcgacccggaactgctgaagctggtcgccaaacacgatcccgacaataaatttgctatgccctatatgtgggcgacgaccgggattggctataacgttgataaagttaaagcggtgctgggcgaaaacgcgcccgtcgatagctgggacttgatcctcaaacctgaaaatctggaaaaactgaaaagctgcggtgtctctttcctggatgcgccagaagaagtttttgctaccgtgttgaattatctcggcaaagatcccaacagcactaaagcggatgattacaccggaccggcaacagatctgctgttaaagctgcgcccgaacattcgttatttccatagttctcaatacattaacgacctggcaaacggcgatatttgcgtcgctatcggctgggcaggtgatgtctggcaggcgagtaaccgcgcgaaggaagcgaagaatggcgtgaatgtcagcttcagcattccaaaagaaggggcgatggcgttctttgatgtattcgccatgcctgcggatgccaaaaacaaagacgaagcctatcagttcctgaattacctgctgcgcccggatgtagtagcgcatatttccgaccatgtgttctatgccaacgccaataaagcagccacgccgctggtgagtgcggaagtccgtgagaacccaggtatttatccgcctgcggatgttcgtgcgaagctgttcactctgaaagtgcaggatccgaaaatcgaccgtgtgcgcacccgcgcgtggaccaaagtgaagagcggaaaataatccgcagtcgtagatgccggaggggcgcaccacacccgccggcaattcgcaccattatggtgcgcttgcacacattcaatgccggagagcagccgtgaatgacgctatccctcgcccgcaggcgaaaacccgtaaggcgctgacgccgctattagaaatccgcaacctgaccaaatcctacgatggtcaacatgcggtggatgatgtcagcctgaccatctacaaaggtgaaatcttcgcgctgctgggcgcatccggctgtggcaagtccacgctgctgcgtatgctggcaggtttcgaacaaccttctgccggacagataatgcttgatggcgtcgatttgagtcaggttccgccttacctgcgccccatcaatatgatgtttcagtcttacgcgctgtttccgcatatgaccgtggaacagaacatcgcttttggcctgaaacaggacaaactaccgaaagcggaaattgccagccgggtcaatgagatgctcggcctggtgcatatgcaggagttcgccaaacgcaaaccgcatcagctttccggtggtcagcgacaacgtgtggccctggcccgaagccttgcgaagcgcccgaaactattactgctcgatgagccgatgggcgcgctggataaaaagctgcgtgacaggatgcagcttgaagtggtggatattctggagcgcgtcggtgtgacttgtgtgatggtcacccacgatcaggaagaggcgatgaccatggcggggcgcatcgccattatgaatcgtgggaaatttgtccagattggcgaaccggaagagatctacgagcatccgactacccgctatagcgccgaatttattggcagcgtaaacgtctttgaaggcgtactcaaagagcgtcaggaagatggcctggtgcttgatagcccggggctggtgcatccactgaaagtcgacgcggatgccagcgtggtcgataacgtgccggtacatgtggcgctgcgcccggaaaaaatcatgctttgcgaagagccgcccgccaatggttgtaacttcgcggtgggggaggtgatacacattgcctatctcggcgatcttagcgtgtatcacgttcgtctgaaaagtgggcagatgattagcgcccagctacaaaacgcccatcgtcatcgtaaagggttaccgacctggggcgacgaagtgcgtttgtgctgggaagtggacagctgtgtggtgctgacggtttaaggagcaaagatgagtacacttgaacctgctgcccagagcaaaccgccgggcggatttaagctgtggttgagccagctgcaaatgaagcatgggcgcaaactggtcattgcgttgccatatatctggttgatcttgctgtttctgctgccatttctgattgtctttaaaataagcctggcggagatggcgcgcgctattccaccttataccgaactgatggagtgggctgacgggcaactgtccatcactcttaatctcggtaattttctgcaactgaccgacgatccgctctatttcgatgcttatctccagagcctacaggtggctgcgattagcacattttgctgtttactgatcggctatccgctggcgtgggcggtggcgcacagtaagcctagcacccgtaatattttattactactggtgatcctgccgagctggaccagctttctgatccgcgtttatgcctggatgggaatattaaaaaacaacggtgtgctgaataattttctgctgtggctgggggttatcgatcaaccgctgaccattctgcataccaatctggccgtttatatcggcattgtttacgcttacgtgccgtttatggtactgccgatttataccgcgttgattcgtattgattatagcctggtggaagcagcgctggatctcggtgcacgaccgctgaaaacgttctttactgtgatcgtgccgctgactaaaggtgggattattgccggaagcatgctggtgtttatcccggctgtgggcgagtttgtgatcccggaactgctcggtggcccggacagcatcatgatcgggcgcgtgctatggcaagagtttttcaataaccgcgactggccggtggccagcgcggtagcgatcatcatgttgctgctgctaattgtgccgataatgtggttccacaaacaccagcaaaaaagcgtgggagaacacggatgaataatttaccggtagttcgtagcccctggcggattgtgattttgctgctgggctttacctttctctacgcgccaatgctgatgctggttatctatagctttaacagcagcaagctggtgacggtgtgggccggctggagtacgcgctggtatggtgagttattgcgcgatgacgcgatgatgagtgcggttggtttaagtctgacaattgcggcctgtgcggcgacggcggcggcgatcctcggaactattgcggcggtggtgctggtgcgctttggcaggtttcgcggaagtaatggctttgcctttatgatcaccgcgccgctggtaatgccagatgtcatcacgggcttgagcctgttgttattattcgtcgcgcttgctcatgccattggctggcctgcggaccgcggtatgctcaccatctggctggcgcatgtcactttttgtacggcttatgtggcggtcgttatttctagtagattgcgggaactggatcgcagcatagaagaagcagcgatggatctcggtgcgacgccgctgaaagtgtttttcgtcattacgctaccgatgatcatgcccgcgatcatttctggctggttactggcttttactttgagccttgatgatctggtgatcgccagctttgtttccgggccgggagccaccacgttaccgatgctggtcttttccagcgtgcggatgggggtgaatccggaaatcaacgccctggcaacattgatcctcggcgcggtcggaattgtcggatttatcgcctggtatctgatggctcgcgcagaaaaacagcggatacgcgacatccagcgtgcaagacgtggctgaagacactaaaatttgccaacctggctacataatgccgcgcatgtcgcggcattgttttcatggaagacgaaacgttgggattttttaagaaaacatctagttctcatgctcgcctgaatgtgcctgcgctggtgcaggtggcggcgctcgccattattatgatccgtggcctcgacgtgctgatgattttcaatacgctgggcgtgcgcggtattggcgagttcattcatcgcagcgtacaaacctggagtttaacgctggtctttttaagcagtctggtgctggttttcattgagatctggtgtgcgtttagtctggtgaaagggcgtcgctgggcgcgctggctatatctgctgacacaaatcaccgccgcaagttacttgtgggcggctagcctggggtacggttatccggagctgttcagcattcccggtgaaagtaaacgtgaaatcttccatagcctgatgctgcagaagctgccggatatgctcatcctgatgctgctgttcgttcccagcaccagtcggcggttcttccagttgcaataatgtgtataatcgtcgcccctgatgatgtgaaggtcaatgtatgcagtgcgcactttacgacgcgggtcgctgtcgttcctgtcagtggataatgcagccgattccagagcaactctccgctaaaaccgccgatcttaaaaatctgctcgccgactttccggttgaggaatggtgcgcgccggtgagtggcccggaacaagggtttcgtaataaagccaaaatggtggtgagtggtagcgttgaaaaaccactgctcggtatgctgcatcgcgatggcacaccagaagacctttgtgactgcccgctttatcctgccagttttgcgcccgtttttgcggcgctaaaaccgtttatcgcccgagcggggttaacgccctacaacgtggcgcgtaagcgtggcgaactgaaatacattctgctgactgaaagccagagtgatggaggcatgatgctgcgctttgtactgcgttctgataccaagctggcgcaactgcgtaaggcgctgccgtggttacacgaacaactaccgcagctgaaagttattaccgtcaatattcagccggtacatatggcgattatggaaggggagacggagatctacctgaccgaacaacaggcactggcggagcgttttaatgacgtaccgctgtggatccgtccgcaaagtttcttccagactaatccggcggtcgccagccagttgtacgccaccgcgcgcgactgggtacgacagctgccggttaaacatatgtgggatctgttctgcggtgtggggggctttggtttacactgcgcgacgcctgacatgcagttaaccgggatcgaaattgcaagtgaggccattgcctgtgcaaagcagagtgccgctgaactgggcttaacgcgtttgcaatttcaggcgctggactccactcagtttgccaccgctcagggggatgtgccggagctggtgctggttaacccgccgcgccgcggcattggtaaaccgctgtgtgattatctcagtacgatggcaccgcgttttatcatctactccagctgtaacgcccaaactatggcgaaagatatccgcgaactgcctgggtttcgtattgaacgggtgcagcttttcgatatgttcccgcataccgcgcactatgaagtgctgacgctgctggtgaagcaataaaaaagccgcatgtgcggcttcagattgctgacaaagtgcgcgttgtttatgccggatgcggcgtaaacgccttatccggcctacaaaagcgtgcaaattcaatacattgcatgggccatgtaggcctgataagcgtagcgcatcaggcaattttacctttgtcatcagtctcaagccgcggttgcggctttctgaatcttactgtgggaaccactggtcactgattttttgataagtaccgtcagctttaattgctgccagcgcgttattcagtttttccagcagggctttgttatccggacgtacagcgatgcccaggccggtgccaaaatattgcggatcggtcactttctcagtagcaacaccaagttgtggattggttttcagccattcgtttaccaccgctgtgtcaccaaataccccatcaatacgaccatttttcagatcgataaaggcattctgataactgtcataagagacagttttcacttccgggtgctgatcctgaatatatttctggtgcgtagtaccgttttccatcccaatacgtttgcctttcagatcggcaaacgttttgtaggtatcttttttggcaatcacgacggcactgttttcatagtagggcgtggtaaagcttacctgtttgctacgctccggggtgatatccataccggagattacggcgtcatattttctgaatttcagggacgggatcaggctgtcgaacgcgtgattagtaaaagtacattctgcctgcatttgtttgcacaaggcttttgccagatcgatatcaaagccgacaatctcattattagcacctatagattcaaagggtggataggtggcactaacgccaaaattgattttctctgcggcagaagcaccgaaagtaaaggaagcaagtaaagcggcaagaactaactttttcatgatggaactcccgtctgtcaatcttatgatttttggccgtgtctgcggcatgggataacaatgccatcaagtgaatttatatgcaataaacatgattaaataatttaaatgaaataaaaaagacggacaacttagtgggttgtccgtcttcattataagaatttatgcactatgtaggccggataaggcgtccccgccgcatccggcacaggcaccgtgctgatgtctgatgcgacgctggcgcgtcttatcagacctacaaaaccccccggcgaatgtacgcagccacattaatttcgccgttcgaatgccagcgctttgcgctcgatcagacgcatcatcagcgtcagcaggccgttaacgaccaggtaaataatccctgccgcaccgaacaccattacatcgtaggtgcgtccgtacaacaactggctgtatcccatcacttccatcagcgtaatggtgtatgccagagaggtacttttgaataccagcaccacttcgttggaataagaagagaggctgcgtttaaaggcatacggcagcaggatcgccagcgtatcttttttgctcattcccagggcgctacaggactgccactgaccttccgggatcgcacgaattgcaccgtaaaacagctgcgtggtatacgccgcactattcaggctcaacgcaatcagcgcacataaccacggttcactcaacaaatgccacagtgccggatactcctgcaaagtcggaaactggcccggcccgtaataaatcaggaagatctgcaccagcagcggcgtaccggtaaacagcgtgatataaccccgcaccagccacaccagcaccggcgttttcagcgtcaggatgatggtaaaaatcaatgccagaatcagtgccacaatcaggctggcaacggttagcgtcaggctggtgtgtagccctttcatcagttcgggtaaatactcaaacattagctgggcctccgctcaaaacgtgtcgcgcgcaggtcaatgcgtttgagaatgtactgactgagcagggtgatcaccaggtaaatcgccgccgccacaatgtaccaggtaaatggttcctgggtacgagtagcgatgctttttgtttgcagcattaaatcattcacactaatcaaactgaccagcgcggtatctttcagcagcaccagccactggttaccgaggccaggcagcgcatgacgccacatctgcggcatcaccagacggaaaaagatagcgcttttgctcagccccagcgcctgaccagactcccactgacccaccggcaccgctttcaacgcgccccgaagcgtttggctggcataggcggcatacagcagactcagagcgatgacaccacaaaggaacgggctaacgtcgaagttctcaatgtccatctgcactgggatctgcacgaacccaagattgatagtgaagccatcgctaagcgtcagcagcagctggctggagccaaaatagataaacagcaccaccagaatttctggcaggccacgcagaatggttaccagcgcactacctgcccacgcgacaggacgccattttgcgctctcccataccgcaaagaacatcgccagcgccagcccgacaatcaatgcacaaacggcaaggccgacggtcatcccggcggcgcttgctaaaggaaaaaattcattcatcaggaattacttctggaaccatttgttgtagatggtttcgtaagtgccatctttcttcactttttccagcgcagtgttgagtttctgctgcagctcagtgttgccctgacgtaccgcgatgccgaggccagtgccgaagtaatctttatcggtcactttgtcgcccaccgccgccagtttcgggttatctttcagccactcagtgaccactgcggtgtcaccgaagacgccgtcgatacgcccgttttgcagatccagttttgcgttctggtagctgtcatacggaacggtagtgatttccgggtgcttatccataatgaatttctggtgtgtcgtcccgttctgtacgccgacttttttgcctttcagctgatcaacactggtgtatttgccttgctgacccacaaacagggcagagttgtcatagtacggggtggtaaacagcacctgcttttcacgctccggagtgatatccatgcccgccatcacggcttctacgcgacggaatttcaggcttgggatcaggctgtcaaacgcctggttagagaaagtgcaggttgcatcaatctctttacacagcgcttgtgccaggtcgacgtcaaaaccaacgatctggttgtttgcatcaatgctttcaaacggaggataggaggcttcggtagcaaaacgaatggtttcggcagctgtggcggaaagactaaaacctgcaattaacgcggcaatcagaacttttttcattgttgttatcccgaatcttagtgagagagatagtttttaaatgcttcggtttgcggctcggtaaagcagctcgcgtcgccttgttctacgatatgaccattttccatatacaccactcggctggcggttttacgcgccacttcaacttcgtgggtgacgatcacctgggtaatattcgtttctgccagctcacgaatgatgctgacgatttgtgccgtaatttccgggtccagtgcggcggtcggttcatcgaacagcagtacctgcggttccatcatcaacgcacgggcaatagcaacacgctgctgctgaccaccagaaagatgcagcgggtaacgatcgctataaggtttgagacgcagacgttccagcagtttttctgcacgggccagcgcctgatctttactcaaccccagtacacggcagggcgcttcaatcaggttttgctgcacggtcagatgcggccacaggttgtattgctgaaacaccatgccaacgttacgacgcaaatcgcgaatcgctttgtcagagggtgttttggtgaaatcgaaatggttgcctgcaatgttgagcgtaccggagcgcggcatctcaagcagattgagtacacgcagcaggctgcttttacccgcgccgctggggccaagtaacaccagcgtttcgccctgtgggcaatccagcgtgatatcgaacagcgcctgatgcgcgccgtagaagcaattaatgccgtttaattgaatactcattgacactcgtatactggcagtctgatagctattgaggtcgaagatagtacctttgacagaataattatgcaatatttctgctttaaaagttaaaagcaaagcgcattattcaataaacatagcacaaaataacgggggcggtggtcggcgagcataaatgtcggcattcctcacgaaatgccggacaatttacggggtttattggttgatcaaggcgttagcgattctcgatggactgacggagcgtacccgccgtggcatgaacgctaccgcctaagtaacgcacatcgtcgatgacccaacactggccttcctgaatcattaacacttcatcctgccaaccctggtcaccctgtttgagatccacgcgcaatggaatgttacgggcatcacgattagggatagtgcttgcactggcaacgtgggcgctatctggcaaggtggttcgactggagaatggatcgttggtcagtagttcccgatggttattatcccgggaggcatcgctaagcagtgtcgccagtttgtcgctcagataagggcgcaaggcggtgatgtcgttgctgcggtgcaaaatgcggtagtcataaaattgctgggccacgttatccgggcctccttcaacgcaaggaccactgcgtgtgccgttatctttataagctggagtgactgtggtgcaggcactgaggagcagtgcgcaggggataagcattgtcaatttgctgtagcgcataatgatttccttataagcgatcgctctgaaagcgttctacgataataatgatatcctttcaataatagcgtatcagtctgataatgcttttgagatcgaaggcttagcaaacaaggagatcgatcatgcaattttctacaaccccaactctggaaggccagaccatcgttgaatattgcggtgtggtgaccggcgaagcgattttaggtgccaatattttccgtgatttctttgccggtatccgcgatatcgttggcggacgttccggtgcgtatgaaaaagaactgcgtaaagcacgggagatcgcctttgaggaattaggctcccaggcgcgggcgctgggggccgatgccgtcgtcggtattgatatcgactacgaaacggtcgggcaaaacggcagtatgctgatggttagcgtcagcggtacggcggtgaaaacgcgtcgatgagaagattcttctggctggtcgctgccgctctgttattggcagggtgtgcaggcgaaaaaggcattgtcgagaaagagggatatcagcttgatacccgacgccaggcgcaggcggcgtatccgcgcattaaagtgctggtgatccactacaccgcagatgattttgatagcagcctggcgacactgaccgataagcaggtcagcagccattatctggtccctgcggtaccaccgcgatacaacggtaaaccgcgcatctggcaactggtgccggaacaagaactggcctggcatgcggggattagcgcctggcgcggggcaacgcgccttaacgacacctctattggcattgagctggaaaaccgtggctggcaaaaaagcgccggagtgaaatattttgccccgtttgaaccggcacagattcaggcgcttattccactggcgaaagatattattgcccgttatcacatcaagccggaaaacgtagtggcacatgcggatatcgcaccgcagcgcaaagacgatccggggccattatttccctggcagcaactggcgcagcaggggattggtgcctggccggatgcgcagcgggttaacttttaccttgccgggcgcgcgccgcacacaccggtagataccgcgagtttgctggagcttttggcgcgctacggttatgacgttaaacctgatatgacaccgcgcgagcagcggcgcgtgattatggcattccagatgcatttccgcccgacgttatataacggcgaagcggatgcagaaactcaggcgattgccgaagcattgctggagaaatacgggcaggattaacgcggcagttttccgtggtcgcgtagccaggcggcagttttctcgataccttcatccagggtgatgaccggctgataacctaactcttcctgcgcacgcgtaatatccagcgtaaagtcaaaattcaacttggagacgccgtagtgggtcagcggcggctcttttgcactcttgcggcctaaacgctccatgctgcgggcgatcatatccagcatcgggtaggggacggaacgaatacgacagtcaatattcaactcgtcgatcagcttctgcacgatgctgcgcagtgtgcgatgctcgccgttggtgatgttgtacacacgcccggaaggtagcttatcgcaggcttcctggcttgccagccacattgcgtgcacggcattttcatagtaggtcatatcgaccagcgcactgccgccatgcggtaacagaatactgccgtagtggtgcatcatatgcgccagacggggaataaagactttatcgtgcggtccgaacagactttgtgggcgcagaatagtaaagcgcgtttgtggattcgcctggctaagcatattgatcacttcttcgctggctgctttgctgcgggcaaactcgttggcgaagcggtgagggcgaaaatcttctttaatatcgcgatggtggtgataatcgaagtacagggagggggaagagatatgaataaagttacgcacaccccaggcgacagcccattcacccaggcggcgagtggcgcgaacgttagccagatcgaaagcctgttgtgtcccccagggactggtaaagctggagcagtgccacagcgtatcaatgcccgcgagcatcactttagcttgactactaaccagctcggtcagatccgccggaacaaactctgcgcccattttttccagcaatttgcccattgcctcgttgcgaccggtcgctcgcacgctgatgcctttctggcataaaaactctaccgcgtttcgacctaagccgctggtggcgccggtaaccagtaccttcatatcaatccactgttgttgagaaaataacgtgcgcattcttccgtgatttcccccatgatgcaatgggaaacatgaaagaataacgcaggttttgtcgattaatctgtgctttgttctgccagtctggcgatttgttttgccattccgcgaaaaataaacagatgcgcggggatcatcaataaccagtaaaacagccccggcataccgtgcggatgccagaaagcgcggacatcgatagtacgatagtcgcctttatcttccaggctaaaacacagtcgtcccagccccggcgctttcatgccaaataacaacgtaagttgtttttccggttcaacgacaatcactttccagctatccaccgcatcgccagtctgtaaatattcgcgctccgggcggcctttcgccagcttatgaccgatcgcgcggtccatcaacgcccgtgtctgccacaaaatattgccaaagaaataacgctctttaccgccgatttggttcactacctgccataaagcagcaaggctggcggacgttttaacggtaaaccccgcctgtttggcaaaataaccgtactccggtcgccagcgggcaaaggcctgagcgtcgtagccccagtcgctggagttgaccagtttttcctcctctttcaacgtgctacgtaccgcgtcatcgaaagcgatcagccgttgtgggatgagtgcacgtagcgcggtatcatccgccagcagatcgtgtttcagcccctgaatcaacgccctggcggtggtgggcggtacggaagtaatcacattgagaaaccacacgctaatccagcgggtggggagggggatggggatcaaccagcggcgcttaccgctcaccgccataaaatgttcaaactgttgctgataactgagcacctctggtccggcggcttcgaagatgcggtgttcgctggccggatgatctaacaacgcaaccagatagtgcagcaagttttccagcgcaatgggcgtggtgcgactacgaacccagcgcggaggcgttaagactggcaggttgtagaccatatcgcgcatgacttcgaacgccgcggaacctgcgccaacgataattccggcccgcagttcggtcacgggtacattcgcttcacgcagaatgtccgccgtagcctgacgagcacgcagatgatcgctctgctcatgtggcggggcctgcaagctactaagaaagattaattgcttaactggtacttcacgtagcgcatcgcggacgttgagagccacctggcgctcctgagcgataaaatcgccgccttcgcccatgctgtgcaccagaaaatagaccgtatcgatatcctgcaacagggccggtaggttatccggccagctgagatcgactttatggcaactgacgtttgccagttgcagctttgcaagcctgtcgacatgacgtgccgccgccaggatctgatgcccttgctggctgagtgtgcgcaccagatgctgaccaatgtagccactggcaccgagaactaaaatgcgttgcggcacgtctctctccttaacgcgccaggaatgcacgccagtgggcggcgacttccgccagttgttcgcggctgacgtcaagatgcgtcaccaggcggacaatcgggctggcgttaatcagcacgtttctcgctttcatgtattcgcctaacgcggcagcattttcttccccgacgcgaacaaacagcatattggtgtcctgacgcatcacatccgcgcctgcttcacgcagctgctccgccatccaggcagcgttgtcgtggtcttcctgcaagcgcgcaacgttatttttcagggcatatatcccggcggcagccagaatgccggactggcgcatcccgccacctgtcattttccgccagcgaatggcacgtttaatgtaatcacgattaccgacgagtaaactaccgactggcgtcccaagacctttgctcaggcaaatggtgaagctatcacaatattgcgtgatctctttcagttcgcagccgtaagccaccacggcattaaagatgcgcgcaccgtcaacatgcagcgccagattgcgctcgcgggtaaattcccatgcttctttcaggtattcccgcggcaacactttgccgttgtgggtgttttccagactgagtaatttggtgcgggcgaaatggatatcgtcgggtttgattttcatcgccactttatccagcggtagcgtgccgtcggcagccgcgtctatgggttgcggttgaatactgcccagcaccgccgcgccaccggcttcaaacagatagttatgcgcggcctgaccgacaatatactcttcgccgcgttcgcagtgactgagcagagcgaccaggttggcctgagtgccggtaggcagaaaaatggcggcttctttaccggaaagctctgctgcgtagtcctgcagagcattaacggtagggtcgtctccgtaaacgtcgtccccaaccggggcggccatcatcgcttcgagcatggcgcggcttggtcgggtaacggtatcactgcgtaaatcaatcatggcatgtccttattatgacgggaaatgccaccctttttaccttagccagtttgttttcgccagttcgatcacttcatcaccgcgtccgctgatgattgcgcgcagcatatacaggctgaaacctttggcctgttcgagtttgatctgcggtggaatggctaactcttctttggcgaccaccacatccaccaacaccggaccgtcgatggagaaggcgcgttgcagggcttcatcaacttcagacgctttttctacacggatacccgtaatgccgcacgcttcggcaatgcgggcaaagtttgtgtcgtgtagttcggtgccgtcagtcaaatagccaccagctttcatctccatcgccacaaagcccagcacgctgttgttaaagacgacaattttcactggcagtttcatctgcactacactgaggaaatcgcccatcaacatgctaaaaccgccatcgccgcacatggcgaccacctgacgttctggctctgtcgcctgcgcacccagcgcctgcggcatggcgttagccatgctaccgtggttaaagctacctaacaggcgacgcttgccgttcatttttagataacgtgccgcccacaccgttggcgtaccaacgtcacaggtgaaaatagcgtcatcggcggcaaaatgactaatttgctgcgccagatattgcgggtgaatggctttctcgctcggtttagctaaatcgtccagccctttgcgggcgtcgcggtaatcttccagcgctttatccagaaacttgcgatcggctttttcttccaccaatggaagcaatgcacgcagagtgctcttgatatcgccgaccagtgccatatccaccttgctgtgagcgccgatgctggctgggttgatatcaatctgaatgattttggcatcggtcgggtagaaggcgcggtagggaaattgcgtgccgagtagcactaacgtgtcggcgttcatcatggtatggaaaccactgctgaagccgattaacccggtcattccaacatcatacggattatcgtattcgacatgttctttaccgcgcagggcatgaacaataggcgctttaattttcccggcaaactcaactaactctttatgcgcccccgcgcagccgctgccacacatcagggcgatattgctggaataacgcagcagttgcgccagtttgcgtaactcttcttcttccggcgtcacgactggttgtggcgcatgataccagtgcatggttgccccttctggcgcaggttttaacgccacgtcgcctggtaacacgacaacgctaacgccacggttaagcaccgctttgcgcatggcaatcgccagtacttgtgggatctgctccgggctggaaaccagctcgcaatagtgactacattcgcggaatagctcttgtgggtgggtttcctggaaatagccgctgccaatttcgctggagggaatatgagcggcaatcgccagtaccggaacgtgattgcggtggcaatcgaacaggccgttgattaagtgcaggttgccggggccgcagcttccggcgcagaccgccagttctccgctaagttgtgcttcagcgccagcggcaaaggccgccacttcttcgtggcgggtggacatccactcgatggtgcccatgcgattaagactgtcactaagaccgttcagagagtcgcctgtgactccccagatgcgtttcacccctgcgctttcgagtgttttggcgatataagctgcaaccgtttgtttcatggttctccatctcctgaatgtgataacggtaacaagtttagttcatctgacggagggggaagggatgggagagaaaggaggcactaacggttaaatagcccgatgaaaggaatatcatcgggcataaggcgattatgcgagaaccaaatccccctgcggatggcaggagcaggccagtacgtaaccttcagcgatttcggcgtcggtcagcgtcattgtgctgctcaccgtatattcaccggaaaccacttttgtcttacagcagccgcaaacacccgcacggcaggcagcgacaaccggaacgttattgctttccagcgcctccagtagcgtggtgccaaccggggcgtaaaattctcgtgccggttgcagtttggtgaatttcagaccgctggtcgccgcttctgctactggggtgaagaatttctctttaaagaaacgcgtcacgccgagcgctttcacttcctgctctacccaatccatatacggagccgggccgcaggtcatcacggtacgactagctaagtcaggtacacctgccagcagttcgcgagtgagacgaccagcgataaagccttcggtaacgttattttctgccaccagcgttaccggatagttacgccactcatcggcgaaaataacatcctgcggcgtacgcacgttgtagatcacccgcacatcggcctgtggacggttcttcgcaagccagcgacgcatgctcataatcggcgtgacgccgcagcctgccgccagcaacaggaatttatcttctgctttatcgtcgcaggtaaattcccccatcgcgtcgctaagccagagataatcaccgcgttttacatcgcgcgtcagccactgggagccgacaccgtcatcaatccgccgcacggtcagggtgatatattcactcacgcctggcgtggaggaaatggtgtaagcacgcagcgtttccgcactgtttcgcacgctgaccagtgcatattgcccggcgcgatatgggtagtaatcgtggcaaatcagggaaatcgtccacacatccggcgtttcttgcgtaatgtgatgaacctgcatccgccacgggcattgattcgttggcatcgtcatcgacaaactccttacgcgctcaacagttgcttcatgtcttcttcaacagtggtgatagaacgcaggccgaatttctcgttcagcaccgccagcaggtctggtgtcaggaaaccaggtgcagtcgggccggtgacgatatttttcacgcccagagaaagcagcgtcagcagaatgacgatcgctttctgttcaaaccaggagagcaccaggctcagcggcagatcgttgacaccgcagcccagtttctctgccagagtgacagccagaataatcgcactgtaagcatcgttacattgacctgcatctaccagacgcggcagaccttcgatatcgccaaactcaagtttgttaaagcgatatttaccacaggcgagggtcaggatcaggcagtcatccggcacgctggtggcgaaatcggtgaagtagtggcgctcgccgcgtgcgccgtcacagccaccaagcaggaagatatgacgcagtttttcacggctcaccagatcaatcagcgtatcagcagcgccaagcagcgtctggcgaccaaaacccacggtgataaggtgcggaatttcgctgtacgggaagcctgccatctgttgcgcctgggtgataaccgcagagaaatcatcaccgtccagatgacgcacgccaggccagccaacaatgctgcgggtccagatacgatcgtcataagcgcctacggttgggtcgatgatgcagttgctggtcatcacgatggggccagggaaacgagcgaactccacttgctgattctgccagccgctgccgtagttaccgaccagatgcttgaatttacgcagctccgggtagccatgcgcaggcagcatttcgccgtgggtgtagacattaacgcccgtgccttcggtctgttccagcaggttgtagagatctttgagatcgtgaccggaaatcagaatgcatttacccgccgtcgctttgacgttgacctgggttggcgtcgggtgaccgtatttaccggtttcgcctgcatccagaatgctcatcactttgaagttcatctggccgatttccatactacactcaagaagcgcgttcatatcggcaggccaggtccccagccacgccatgattttatggtactgggcataaatatcgttgtcgtattgaccgagaacatgcgcgtgttccatataggccgccgcacctttcaggccatacaggcacagcagacgcaggccgagaatgttttcgccaatcgccgctttatctttgttaggggtaaattctgctgcctgacgttgcagctcgccgagatcgtcgctcaccagttgcaggtcagccatcgggttatcgacgcgcgcgttggcatctacagccaggcattgcgctttcagcgcctcgcgcagggcaatcgcttcacgagcgtagccgacaatacgcggagaatcgaagttaacgttggtcagggtactgaaaaaggcacgtggcgcgaagctgtcaacatcgtggttgatgatgccgtattcacgcgcttttaccgcccaggcagaaagcccttgcagcgccgcgatgagtaaatcctgaaggtcagaagtttccgccgttttaccacacatcccctgcgcgtaactgcagccgtttcctgccggagtacggatagtttgttcacattgcacacaaaacatgatcacaccttttaaagttatatttaatatacatgtttaaggttaagacgcttaacgcggggataaaagggatttttcatgcaactttaagggagattgatttagcgcaattttggcggcagggatctaccgccagagaggtattacgcagagaaaaaggcgatgaggatcggcactaacaggctaagaataaaaccgtgaacaattgccgccgggaccatatccagcccgccagtacgttgaagaacgggcagggtgaaatccatacttgtggcaccgcataagcccagtgcagtagagcggctgcggcgaatcagcccagggatcaacataatagcaatcagttcacgggccagatcattaaaaaacgccgcgctcccgattaccggaccaaaagattcggtcaataaaataccggaaagagaataccagccgaaaccggaggccattgccagcgcggtattgatggggagatcaagaataaaggcgttaattaaaccaccaattaaactactgacaaccaccaccacggcgacaatcattccccggcgattaaggacaatctgctttaaggtcatgccattattgcgcaactgaataccaacgaggaaaagtagcaaaattaacgtgtattcactggcttcggtcgcgtgttgtaagaaagccagtccacttagaccaatggcaaaaccaatcactactacgccgcacagttttaggctctccagcgccatcgcaatacggctcgggagtttttcttgctgatggtggttgcgccacggcaggcctcgctccagccacatcagggcggcaatattacacagtaaaataacggtaatactgacggcagaataatgcagaatcgccaacaggttactggcgaggttatcgagaaacgccagactgatacccataaaaaagagaataaggtaaaccatccagcttaatagctgattaataacttttaacgcagcttgttggcgaagcggaatgaggtaacccacaatcaggggaaccagaatgattaacagcccagaaaacatgaaaacccagtccttgcaaagatgaagtcgaaatgcgcgatgacacactactgaaagcggaaggacgagtaaagttgcaattaaaaggaaatgttatgcataaggagcagtagagtattcgttttcatttaaagatattcttgcgctttaattacaaactgcaccgatgttggtggcgtcaaaatcgccgaggcgttccctgaaggccggggcagcccacatggatgtgggctgagggcgcgttttacagggatgttacctcgcgcccgacccggtagccgtaagggataagtcgagggcaccgcgcagcggcgattttgttcgccagagcccgggggtgcagggggcggcggcgattggccgccccctgcgcgctccttgcgccagtggcaatatgttgcttagctcatgaaaggagcgcaacaagatgatgaatcaacatataacaacatcttaaaaaaaggcctgacattacgccaggccttctgcgttaattaatcacgcttttccagcagggtccggtaaatcagaccaccgataatgccgccgacaattggcaccacccagaagaaccacagttgttctaatgcccagccgccctggaagatagcaaccgcggtgctgcgcgccgggttaacagaagtgttagtcaccggaatactaattaagtgaatcagggttaaggccagaccaatagcgatcggcgcaaaacctgccggcgcgaatttgtcggttgcgccgtggatcaccaacaggaaacctgcactcaataccagttcaactaccagcgcggaaagcatggaataaccgcctggactatgctcgccataaccgttagaagcaaaaccgctggctgccgcgtcaaaacccgttttaccactggcaattaaatacagcagcgccgctgcaacaataccgccgacaacctgggcaattacgtagccaacgacttcttttgccggaaaacgtccgccagcccataaaccaatagtgaccgccgggttaaaatgaccaccagaaatatgaccaacagcaaaggccatcgtcagaacggtcagaccgaacgccaacgccacgccggcaaaaccaatgcctaattccgggaagcctgcggccagtacagcactaccacagccaccaaaaacaagccagaaagtaccaaaacattcagctgctaattttctgaacatatccaccacaattaaaaattgaccctgtgaaaaatatggtcgttttatagggtcgtcgtaaaaaagtgacgacggaaataatgcgcggctattttaaaaacgaaggcgagtcattcaccagataaataaatccagtaaatttgatttagggcaacagcgggttgccccatatagtcatttgtctgattgacagtgtagtgcacgcaaaagatttaatcctttaggcgtaataaaaaataatttatcatgctaattatttgattttgttgtttttgcagacttatcagcaagagggagtataacgcgattattcgctcatttttcagacatttgccatgcttaaatgtgatgtcatcacgtattagcaaggcctttcccgttatactgccagcgtaaaggataagtcacatatttctggaggggatatgattcttgagcgcgttgaaattgtgggttttcgcggtatcaaccgtttgagcttgatgctggaacaaaacaacgtcctgattggggagaacgcgtggggtaaatccagcttgctggacgccttaactctgctgctaagcccagaaagtgatctctaccattttgagcgcgacgatttctggttcccgccgggagatatcaacgggcgagaacatcatctgcatattattttgaccttccgcgaaagcctgccaggccgacatcgggttcgccgttatcggccgctggaagcgtgctggacgccatgcaccgatggctatcaccgtattttttatcgtctggaaggggagagtgcggaagacggcagcgtgatgacactgcgcagttttctcgataaagacggacatccgattgatgtcgaggatattaacgatcaggcacgccatctggtgcgtttaatgccggtgctgcgcttgcgtgatgcccgttttatgcgccgtattcgtaacggcacggtgccaaatgtccctaatgtggaagtcaccgcgcgccagctcgatttcctcgcccgtgagttatccagtcatccgcaaaatctctctgatgggcagattcgtcagggactttccgcaatggtacagctgcttgagcattatttctctgagcagggggccggacaggcgcgatatcgtttaatgcggcggcgagccagcaatgagcaacgaagctggcgctatctggatatcatcaaccggatgattgaccgacctggtgggcgcagctatcgggttattttgctcggcctatttgctactttgttgcaggcaaaaggcacattgcgactggataaagacgcccgtccattgttgctgatcgaagatccagaaacccgtttacaccccattatgcttagtgttgcctggcatctgttgaatcttctgccattgcagcgcattgccaccaccaacagcggtgagttgcttagcttaacgccggtagagcatgtttgccgactggtacgtgagtccagccgcgttgccgcctggcgtctggggccgagtggcttgagtaccgaagatagccgacgcatatcctttcacattcgttttaaccgtccgagtagcctgtttgcacgctgctggttgctggtggaaggggaaacggaaacctgggttatcaatgaactggcgcgtcagtgcggacatcattttgatgccgaagggatcaaggtcattgagtttgcccagtccgggctaaagccactggttaaatttgcccgccgaatggggattgaatggcatgtactggtcgatggcgatgaagcagggaagaaatatgccgctacggtacgcagcctgttgaataacgatcgggaagccgaacgagaacatttaacggcgttaccggcgctggatatggaacattttatgtatcgccagggattttccgatgtgttccaccgcatggcgcaaatcccggaaaatgtaccgatgaatctacgcaaaattatcagcaaagcgatccatcgctcttccaaacccgatcttgccattgaagtggcaatggaggcaggacgtcgtggtgtggactccgtaccgacgctgctgaaaaaaatgttcagtcgcgtgctgtggctggcgcgcggtcgcgcggattaaccgcgaaacatcgtggccatttgtggctgaatagcgtcgagcatctcatagcgccgacggtattcagcccgttttttactggcgatttcggcaatctcttttcgtgctatctgtgctggaaggcggtaatggcgttcagcatcacatacgccgccaacgctttcccagaaagcgttgtaatcagcgtggatcttgccttctttatcgcgataacgcaggctgcggtaaatatgcgtttcattgctgacggcaataatctgctctacctgcaaacgttgggcaaacagacaggccgcttccatcacgaggcgtttgggaaatagcccgtggcaggctttcgtcgcattctggatttcctgatgtggaatttcccattttgcgccttgcagtccgccaataaacatcgttcttttcccctgatattcacacagggtaaacgtgatctctgccagaggaataccttcgctgttgcggaacaggattgtgctgtcaccttctttatccatactgatcatcatggtcagctcaagcgtgaactgctcgccgtttttgccttccagcttcgccagttgcagcccgggggtattcaaatataagctgaattcttccgcgctcatacattcgcggagtaacgcataatggtaacgtaacgcctccagcaattgcttacggctaagattcgccgcaaggtaagggcgatgcagacgcacaggcagtcgcggctggcgcgttaacaatacattgagattaggccagtgggaaagttcgttcatccactcaacgcttaaacgcggcataatcaagctgcgcagcaaaaatttctggcgaaaactacggcgatgccagaatttacccggccgacactgtccacgtgccagactaagaaaaagactcaggctgctgagagattcagatggcgtaaaggtccgttcagttagctggctcatattcatgaaatcaatggttatacatggcgtgcttttcaccattgcgtatcttaaccaaacatcaatagtgtgattactaacgtaaattttagggttttgttgatatttcgttgaagttaatgacccggattggcatatggagtattcagaaaatttatgaaaaagcggaaaaccgtgaagaagcgttacgttattgcgctggtgatagtcatcgccggactgattacgttatggagaattcttaacgcacccgtgccgacttatcagacgctgattgtgcgccccggtgatttacagcaaagcgtgctggcgaccggaaagctggacgcgctgcgtaaggttgatgtgggcgcgcaggtcagcggtcagttgaaaactctgagcgtggcgattggcgataaagtaaaaaaagaccagcttttaggggttattgatcctgaacaggctgaaaaccagattaaggaggtcgaagcaacgctgatggagctacgtgcgcagcggcagcaggcggaagcggagctgaaactggcgcgggtgacgtattcccgtcagcaacgtctggcacaaacgaaggctgttagtcagcaggatctcgacaccgccgcgacggagatggctgtgaaacaggcgcaaattggcaccattgacgcgcaaatcaagcgcaatcaggcttctctcgatacggctaaaaccaatctcgattacactcgcatcgttgccccgatggccggggaagtcacgcaaatcaccactctgcaaggccagacggtgattgccgcacaacaagcaccgaacattctgacgctggcagatatgagcgccatgctggtaaaagcgcaggtttctgaagcggatgtaatccacctgaagccggggcaaaaagcctggtttacggtgcttggcgatccactgacgcgctacgaggggcaaatcaaggatgtactaccgacgccggaaaaggttaacgacgctattttctattacgcccgttttgaagtccccaaccccaatggtttgctgcggctggatatgactgcgcaagtgcatattcagctcaccgatgtgaaaaatgtgctgacgatccctctgagcgcgttaggcgatccggttggcgataatcgttataaagtcaaattgttgcgtaatggtgaaacacgcgagcgtgaagtgacgattggcgcacgtaacgataccgatgttgagattgtcaaagggcttgaagcgggcgatgaagtggtgattggtgaggccaaaccaggagctgcacaatgacgcctttgctcgaattaaaggatattcgtcgcagctatcctgccggtgatgagcaggttgaggtgctgaagggcatcagcctcgatatttatgcgggtgagatggtcgcgattgttggcgctagcggttccggtaaaagcaccctgatgaatattctcggctgtctggataaggccaccagcggcacctatcgcgtcgccggtcaggatgttgccacgctggacgccgatgcgctggcgcaactgcgccgcgagcatttcggctttattttccagcgttaccatttgcttagccatttaaccgccgagcagaacgttgaagtacccgccgtctatgctggtcttgagcggaaacagcgactgcttcgtgcccaggagttgctgcaacggctggggctggaagaccgtacagagtattatccggcacagcttagcggtggtcagcaacagcgcgtcagcatcgcgcgggcattgatgaacggtggtcaggtaattcttgccgatgaaccaaccggcgcactggacagccattctggcgaagaggtgatggcgatcctgcatcagctgcgcgatcgtgggcatacggtgattatcgtcacccacgatccgcaggtcgctgctcaggccgagcgggtgatcgaaattcgcgacggcgaaattgtgcgcaatcctcccgccattgaaaaagtgaatgttactggcgggacggaacctgttgtcaacacggtgtctggctggcggcagtttgtcagcggttttaacgaggcgctgacgatggcatggcgggcgctggcagcgaataaaatgcgtactttactgaccatgctggggattattatcggtattgcgagcgtggtttccattgtcgtggtgggtgacgccgccaaacaaatggtgctggcggatattcgttctattggtacgaatactattgatgtctatcccgggaaagattttggcgatgacgatccgcaatatcagcaggcgctgaagtacgacgacttaatcgccatccaaaaacaaccgtgggtcgccagtgccacacctgccgtcagccaaaacctgcgcctgcgttataacaatgttgatgttgctgccagtgccaatggcgtgagcggcgattattttaatgtctatggcatgaccttcagtgaaggaaacacctttaatcaggagcagctgaacggtcgtgcgcaggtcgtggttctcgacagtaatactcgccgccagcttttcccccataaagcagatgtggttggcgaggtgattctggtcggcaatatgcccgccagagtcattggtgtggcggaagaaaaacagagcatgtttggtagcagtaaagtgctgcgtgtctggctaccttacagcacgatgtccgggcgagttatgggccagagctggcttaactccattactgtcagggtgaaagaaggatttgacagcgccgaggcggaacagcaactcacgcgtttacttagtctgcgccacggaaagaaggatttctttacctggaacatggacggcgtcttgaaaactgttgaaaagaccacacgtactttacaactgtttctgacgctggtggcggtgattagcctggtggtgggcggtattggtgtaatgaatattatgctggtgagtgtgaccgagcggacgcgggaaattggcattcgcatggctgtaggtgcgcgagcaagcgatgttttgcaacagttcctgatcgaagccgtactggtttgcctggtcggtggcgcgttgggaataacactgagtctgttaattgctttcaccttgcagcttttcttacccggctgggagattggttttagtccgttggcgctgctgctggcgtttctctgcagcacggtcaccgggattttatttggctggttacccgcacgaaatgcggcacgactggatccagtagatgctctggcacgagagtaatttttgagataaaaatgccagccgatcgggctggcattttgcctttaggatgtacacaatgagacagaagagttatgcgactgccgcttctacttcgacgggcacaataacactggcgtgattgccttttggcccctggtggacatcaaactgaacggattgtccagcttttagcgttctgtaaccatccatctgaatggtggaataatgagcgaaaatatcttcgccgccgccttcagggcagatgaaaccaaaccctttggcattgttgaaccacttaacagtacccttttccatgcttcgacatccttcgcaaatcttatacaagtaagatggaataaaccggggtcagagagggggctgttcaaaacctcgccaactctagaaatacaatttagagaattagggcgagccgtcaagcatttgacaggggacaaggggcaggtatgaatcaaaaatttgaagcagttaacgctattgacaggaatgtgacagatgtcgctgatgccaacgatagatgatagttatctatcatgtggagtagattggtcaggcaaataagctcttgtcagcggcagggcgttctgccgataaccgtaaccgaagatgataactgacaatgggtaaaacgaacgactggctggactttgatcaactggcggaagaaaaagttcgcgacgcgctaaaaccgccatctatgtataaagtgatattagtcaatgatgattacactccgatggagtttgttattgacgtgttacaaaaattcttttcttatgatgtagaacgtgcaacgcaattgatgctcgctgttcactaccaggggaaggccatttgcggagtctttaccgccgaggttgcagaaaccaaagtggcgatggtgaacaagtacgcgagggagaatgagcatccattgctgtgtacgctagaaaaagcctgaatgcaggcataaaaattgggggaggtgcctatgctcaatcaagaactggaactcagtttaaatatggctttcgccagagcgcgcgagcaccgtcatgagtttatgaccgtcgagcacttgttactggcgctgctcagtaacccatctgcccgggaggcgctggaagcgtgttctgtggatttggttgcgctccgtcaggaactggaagcctttattgaacaaaccacacccgttctgcctgccagtgaagaggagcgcgacacacagccgacgctgagttttcagcgtgtactgcaacgtgcggtcttccatgtccagtcctccggtcgcaatgaggttaccggtgcaaacgttctggtcgctatctttagcgaacaggagagccaggcggcatatctgttgcgtaaacatgaagtcagccgtctcgatgtggtgaactttatctctcatggcacgcgtaaagacgagccgacacagtcttctgatcctggcagccagccaaacagcgaagaacaagctggtggggaggaacgtatggagaatttcacgacgaacctgaatcagcttgcgcgcgtgggcggaatcgacccactgattggtcgtgagaaggagctggagcgtgctattcaggttctctgccgtcgccgtaaaaacaacccgctgctggtgggggaatctggtgtcggtaaaaccgcgattgcggaaggtcttgcctggcgaattgttcagggcgatgtgccggaagtgatggctgactgtacgatttactctctcgatatcggttctctgttagcgggcacaaaatatcgcggcgactttgaaaaacgttttaaagcgttgctcaagcagctggagcaggacactaacagcatcctgtttattgatgagatccacaccattatcggtgcgggtgcagcgtctggtggtcaggtcgatgcggctaacctaatcaaaccgttgctctccagcggtaaaattcgtgtaattggtagcacaacctatcaggagttcagcaacattttcgagaaagaccgtgctctggcgcgtcgcttccagaaaattgatattactgaaccgagcatcgaagaaactgttcaaatcatcaatggcctgaaaccgaagtatgaagcgcaccacgacgtgcgttataccgcaaaagcggtgcgtgcggcggtagagctggcggtgaaatacattaacgatcgtcatctgccggataaagccattgatgttatcgacgaagcgggcgctcgcgcacgcctgatgccggtaagcaaacgcaagaaaaccgttaatgtggcggatattgagtccgtggtggcccgtattgcacgcattccagagaagagtgtttctcagagtgatcgtgataccctgaaaaacctcggcgatcgcttgaaaatgctggtcttcggtcaggataaagccattgaggcgctgactgaagccattaagatggcgcgtgcaggtttaggtcacgaacataaaccggttggtagcttcctgtttgccggccctaccggggtcgggaaaacagaggtgacggtacagcttagcaaagctttgggcattgagcttctgcgctttgatatgtccgagtatatggaacgccataccgtcagccgtcttattggtgcgcctccgggatacgttggttttgatcagggcggtttgctgactgatgcggtcatcaagcatccacatgcggtgctgctgctggacgaaatcgagaaagcgcacccggacgtgttcaatattctgttgcaggtgatggataacggtacgctgaccgataacaacggacgcaaagcagacttccgtaacgtggtgctggtgatgaccaccaacgccggggtacgggaaactgagcgcaaatccattggtcttatccaccaggataacagcaccgatgcgatggaagagatcaagaagatctttacaccggaattccgtaaccgtctcgacaacattatctggtttgatcatctgagtaccgacgtgatccatcaggtggtggataaattcatcgtcgagttgcaggttcagctggatcagaaaggtgtttctctggaagtgagccaggaagcgcgtaactggctggccgagaaaggttacgaccgggcaatgggcgctcgtccgatggcgcgtgtcatccaggacaacctgaaaaaaccgctcgccaacgaactgctgtttggtagcctggtggacggcggtcaggtcaccgtcgcgctggataaagagaaaaatgagctgacttacggattccagagtgcacaaaagcacaaggcggaagcagcgcattaatctgattgttaggtaggttggtcaagtccgtaatctcgaaagaggttacggactttttgtttatggggtggaggaggttcagaccctttttttaatgatgatggtaagttgttgataattagtgctgcgggaaggtaaggataaaaaagggtgctgcaggagaatgggatggttttgctttattaacaacgggctaaacgtgtagtatttgagttcactgccgtacaggcagcttagaaattcacaggtaacatactccacccgcccaccatgttcactgccgtacagacagataaaatgcgaaaaaaaagctcgcactttcgtacgagctcttctttaaatatggcggtgagggggggattcgaacccccgatacgttgccgtatacacactttccaggcgtgctccttcagccactcggacacctcaccaaattgttttgctaccaaacctcatgggtggcaacggggcgctactatagggagttggagtaaaacggtcaagaagaattttaatgataattattgtttgctcatactgtaaacaagttgtgcagtatatctacatcgagacaagttacggacttatacttccaaagtacttcatacatatcacaaaataaaaaggccggttaaaccgaccttttactcgttctttctcttcgcccatcaggcggtaaaacaatcagcgactacggaagacaatgcggcctttgctcaggtcgtacggggtcagttcaacagtcactttgtcgcccgtcaggatgcggatgtagtttttgcgcattttaccggagatgtgtgcagtaaccacgtgaccgttttctaactctacgcggaacatggtattaggcaacgtttcaagaacggtaccttgcatttcaatattgtcttctttggccatctaatcctctggggtatcactaccgtaatttgaaccggcaagataatgccgaagttctgtaaataagtaaagatttgcgcgctaaatcgcaacaaacaggttcggcacattactccgaaaacacacggctaagccgcaccaaaagcgcaacgtataagggagcggtgagataaacgatgggcgttacctgacgcgaaaaattccttatcggcagcggggtaatgagcgtaaccaactctgcgaccgcaattataacactctggggagaaatgtgccgaaaacattcattcttgtggactaaacaagcatcgtggtacccagaaattattcggcaatcgtccgaggcgcatttgattgagataattaaggtaatcccggcggggaatttcgcaggcaccaaggcttgctgtgtgatcgttaaggacctggcagtcgataagcttaccgccatgaccgataaattcctcacagaataccagaagcgccgttttagacgcattttccatccggctgaacatggactcgccacaaaatagcgttccctgggccacgccgtacataccgccgacaagctcatcttcacgccagacttcaatggagtgggcatggccgagttcgtgaaggcgatggtaggcttcgaccacgccacgcgtgatccaggttccttcttcgcgatcgctggcacagccttcaatgacctgaccaaaagcgtaattcatcgtgacacgataggggctgcgtttatgaaatcgcttcatactacggctgatatgcagactttctggccatagcaccgcgcggggatcggggctccaccagaggatggggtcgcctggagaaaaccacggaaaaataccacgctggtaagccattaacaggcgcgcagggctaagatcgcccccaagtgccagcaggccgttaggctcacgtaatgcgccttccggggaagggaaggctatactatggcgagaaagctgaaccaggcgcatgaccgcaaaactccacgcaagtcggatcgttcaataatagcttacaaaccctgcttgaactggtaataacgcccctgtctggcaagcagttctgcgtgagtaccttgctcaataatttgcccgttgtccatcactattatttgttggaaacgagagagtccgcgaagtcgatgggtgaccattaacaccgttttctcacgcatcatttctgcaagcaattcaaggatctggctttcggttgtggcatctaagccttcggtaggttcatccagcaacaccagtggcgcatcatgtaacagcgcacgggcgatagccagacggcgcagttcaccaccggagagctggcgtccgccttcacctaaccaactgttgagacctgcatcctcgagcagcttttccaggccaacgcgacgcaagatctcgctcagagcctcatcactactgccagggctggcgagtaaaagattatcacgcagcgtggcgctaaacagatgcactcgctgaggaacaacgctgatggtctgtcgtagagccgcttcattcaggctggctatggggctatcgttaagcaaaatctcgccctgttgcgggtcccatgcgcgggtcagctgttgtaacagtgtacttttgccgcatccggttcgcccgagaatcgctatatgttccccggcgtttacctgaagagaaatccctttaagtgcctgttgagattgctccggataagtgaactgaacatcccgtaacgtcaggctaacgcgatcggcaacacgagtttgggtatcaggaaaggtgacctccggtttttgatccgttaagtcagagatacgtacggcagaggcaatgacttgccccagatgctgaaatgcacccgttactggtgccagtgcttcaaacgcggctaacgcgcagaagacaaacagggcaattaacgcgccgggttgagcattgccgccaacgccgccagacgccatccacagcatcaggatcaccgctaacgcgccaatgagcagcattatcgcttggctcaatgcggtcagttcagattgacggcgttgcgcttccagccattgaatttctgtattctctagttgcgtgcgataacgatcgctggcaccaaaaatggtcagctcagcttgcccttgcagccaggccgtcagttgttggcgatactgtccgcgaagatgagtcagattttgcccggtgctttttcccgcacgataaaacagcggtggcatcaggaaaagcgtcagtaacataatgccgcccagcgtaaaggcgagggtgaaatcaaggaaacttaacccgattgtcaccaccataatcaccacaaaagcgcccaccagcgggctgataacgcgcaggtaaagatgatcgagcgtatcaacatccgccaccacgcgattgagcaattcgccctgacgatagcgcgccagtccggcaggggagaggggcagcaatttgctgaaggtgtaaatgcgcagatgctgcaacacgcggaaagtcgcgtcgtgacttaccagacgttcaaaatagcgcccggcagtacgggtgattgctgcgccacgcacgcccgcagcgggtagcatatagttgaagctgtacagtccggcaacccccgcaaccgcactggcgctgaggaaccagccggaaagtgtcaacagaccgatactggcgagcagcgtcacaattgccagcacaataccaagacttaacatccatttatgacgtttatacagtgccagatagggtagcaaagcgcgcatttaaatctcctcctgacgatgggccagtaatgtggcgaatgggccaccagccacacttaattccgcgtaacgtccttgctcaataatccggccatcctgcataacccaaatgacatcccagtcagcaagatcttctaactggtgggtgaccattaacgttgtctggcgcagagaggcggcattcagcgcctccattacgcgctgttcactgtgagcatcaaggctggcagcgggttcatccaacagtaataggctacagggatttagtaacgcacgggccaccgccacgcgctgcgcctgccccacggaaaggcgggcagcctggtcgccaacaggcgtatcaacgccttgtgggaggagcggtagaaactcgctgacccaggcgttatccagcgctgcttgtaattcttgttcgctggcatcaggtcgcgccagtagtacgttatcccgcaatgttgctgccggtaattgtgggttttgcccaacccaggagagatgtttacgccaactttctggacttaaatcgcgtaattctatcccgttgattcgtaggcttccctgataactgagaaaaccagaaagcgcgttcagcagactgcttttaccactaccgctgcgaccaaccaacaccgcacgttggcctgctggcaaagtaaagttcagcggtccggccagcgttttaccttccgggctcgtgataaacagctcctcggcctcaatggtcaccggatcggtgcttgctaattccgcctcaccacgttgcggatgggcgagcggggtttccataaacgttttcagactgtcagctgcgccaacagcctgggctttagcatgataaaacgtaccgagatcgcgtaatggctggaaaaactctggcgcaaggatcagggccagaaaacccgcagccagcgtcacaccggtatcgtagtgaccaaaatccagctcgccgagataggaaaaaccaaagtagaccgccaccagagcaatactcaggctggtaaaaaattcgagaatgccggaggataaaaacgccagccgtagcacttccattgtccgttggcggaaatcttcgctagcagaacgaatactttcaatttcagcttcaccacgaccaaaaatacgcaatgtttccatgccgcgcaggcgatcgaggaaatgcccacttaagcgagcaagagcgagaaagttacgtcggttagcatcggcagcccccattccaaccagcgccataaacaacggaattaacggtgcagtgcccagcagaatgagcgccgcagcccagttagaggggaagattgccaccacaatcagcaacggcacgctcactgccagcgccatttgcggcagatagcgtgcatagtaatcatgcatatcgtcaatttgctcgagtaccagcgtcgcccagctccccgcaggtttaccctgaatccacgctggccctgcttgttgcagacggtcgagaacctgacggcggatggcaaagcggatatgctgcccggcgtgataacccacccgttcgcgtaaccagaccacccatgcgcgcagtacaaaggtcagaaccagtaacgtaaagggaagcagcagggcttcacggggaatattctccataatcatatgttgcagaattcgcgccatgaaccaggcctgggcaatgatcaatatgccgctcacaaagcccagcagacgagaaatattcagccaacgttgggagatgacgctttgctgttttaaccagcgggttaactctttttgacgagatttattcattgcacgcttagcaggtgagttatcagaattatttgcagagcaatgttacaacggggaaaaaataaaggcgacccatagtcgcatggtgtcgccttctttacttttgttactgatttgtaaaattattttgcgtcagctaaaccatcgaggtagcgttccgcatcaagtgctgccatgcagcctgtaccggcgctagtaatggcctggcgataaatgtgatccatcacgtcgcctgcggcaaagacgccaggaatgctggtctgggtggcattaccatgaataccgctctgtactttgatgtagccgttttccagttccagctgcccttcgaaaatcgcagtattcgggctgtgaccgatagcaacaaacagaccggcaacgtcgagactctcgatgttatcgctgttttgcgtatcgcgcagacgaacgccagtgacacccatttgatcgccggtcacttcttccagcgtacggttggtgtgcagaatgatgttgccgttctccactttatccatcaggcgcttaatgaggattttttccgcgcggaaaccgtcacggcggtgaatcagatgcacttcgctagcgatgttagacagatacagcgcctcttcaaccgcggtattgccgccgccgatgaccgcaactttctggttgcgatagaagaaaccgtcgcaggttgcacaagcagaaaccccacggcctttaaaggcttcttcagagggcaggccgagatagcgtgcagaagctccggtggcaataatcagcgcgtcgcaagtgtattcgccgttatcgccattcagacggaacggacggttttgcagatccaccttgttgatatgatcaaaaatgatctcagtttcaaacttggtggcatgttcgtgcatgcgctccattaataacggaccggtcagatcgtttggatcgccaggccagttttccacttccgtggtggtggtcagttggccgcctttttccatgccggtaatcagcacaggttgcaggttggcgcgcgccgcgtagacagcagcggtgtatcccgccgggccactacccaggataagcagtttactgtgtttggtcgtgcccatgagatccccatagttgttggcagacaatgggcaggattgtagggaatttacagacgtaaaaaaagagtatgacgattttgttaacaatttgtgcaatcggcagcatcgataagcaggtcaaattctcccgtcattatcacctctgctacttaaatttcccgctttataagccgattaaatgatgaataaacgcccctgttaatgaatatctggcatgttgtactaaaaatcgatgttttgctttgacaatcccctggtgttttgcgaaaacattcgaggaagaaaaaaaacagtattcttatatgcgcataaccatgcatgtaaataccatgtttaccgtgctagtgaaatctacgtatggcgtggacagacgccattcgtgatgtcgatagctgccacaaggcaacggtcttctcaccgtagacccaggcattgcgcgccgtgaatcttcatgatttcggtctatcgtgacgggtagcgactctgaacagtgatgtttcagggtcagacaggagtagggaaggaatacagagagacaataataatggtagatagcaagaagcgccctggcaaagatctcgaccgtatcgatcgtaacattcttaatgagttgcaaaaggatgggcgtatttctaacgtcgagctttctaaacgtgtgggactttccccaacgccgtgccttgagcgtgtgcgtcggctggaaagacaagggtttattcagggctatacggcgctgcttaacccccattatctggatgcaagtcttctggtattcgttgagattactctgaatcgtggcgcaccggatgtgtttgaacaattcaataccgctgtacaaaaacttgaagaaattcaggagtgtcatttagtatccggtgatttcgactacctgttgaaaacacgcgtgccggatatgagtgcctaccgtaagttgctgggggaaaccctgctgcgtctgcctggcgtcaatgacacacggacatacgttgttatggaagaagtcaagcagagtaatcgtctggttattaagacgcgctaacacggaacaggtgcaaaatcggcgtattttgattacactcctgttaatccatacagcaacagtactggggtaacctggtactgttgtccgttttagcatcgggcaggaaaagcctgtaacctggagagcctttcttgagccaggaatacattgaagacaaagaagtcacattgacaaagttaagtagcggccgccgccttctggaggcgttgctgatccttattgtcctgtttgccgtctggttgatggctgccttactaagctttaaccctagcgaccccagctggagccaaacggcctggcatgaacctatccataatttaggtgggatgcccggtgcgtggttggcagatacgctgttctttatttttggcgtgatggcttacaccattcccgtcattattgtcggcggttgttggtttgcctggcgtcatcagtccagcgacgaatacattgattattttgccgttagcctacgcatcattggcgttttggcgctcatccttacctcctgtggtctggcggcaatcaacgctgacgatatctggtattttgcctccggtggcgtcattggcagcttactaagcactacgctacaaccactgctacacagtagcgggggaactattgcgctgctctgcgtttgggcagcgggcctgacgttgttcaccggttggagttgggtgaccattgctgaaaaactcggcggctggattttaaacattctcaccttcgccagtaatcgtacccgtcgcgatgatacctgggtcgatgaagatgagtatgaagacgacgaagagtatgaagatgaaaatcacggcaaacagcatgaaagtcgccgtgcccgtattcttcgcggcgcgctagcgcgtcgtaaacggttggcggaaaaattcattaatccgatggggcggcaaacagacgctgcgttgttctccggtaagcggatggatgatgacgaagagattacctacactgcacgcggtgtggctgccgacccggacgacgtcctatttagcggcaatcgtgcaacgcagccagaatatgacgaatacgatccattattaaacggtgcgccaattaccgaacctgtcgctgtagcagctgctgctaccacggcgacacaaagctgggctgcgccggttgaacctgtgactcagacgccgcctgttgcctctgttgatgttccacctgcgcaacctacagtagcctggcagcctgtaccgggtccacaaacgggagagccggttattgctcctgcaccggaaggttacccacagcagagtcaatatgcgcagcctgcagtgcaatataatgagccgctgcaacaaccagtacagccgcagcagccgtattatgcacctgcagctgaacaacctgcgcaacagccgtattatgcccctgcgccagaacaaccggtggcaggtaacgcctggcaagccgaagagcagcaatccacttttgctccacagtctacataccagactgagcaaacttatcagcagccagccgctcaggagccgttgtaccaacagccgcaacccgttgaacagcagcctgttgtggagcctgaacccgttgtagaagagacaaaacccgcgcgtccgccgctttactactttgaagaagttgaagagaagcgagcccgtgaacgtgaacaacttgcggcctggtatcaaccgattccagaaccggttaaagaaccagaaccgatcaaatctagcctgaaagcaccttctgttgcagcagtacctccagtagaagccgctgccgctgtttccccgctggcatctggcgtgaaaaaagcgacactggcgacgggggctgccgcaaccgttgccgcgccagtcttcagtctggcaaatagcggtggaccgcgtcctcaggtcaaagaggggattggtccgcagttgccacgaccgaaacgtatccgcgtgccaactcgtcgtgaactggcgtcttacggtattaagctgcccagtcagcgtgcggcggaagaaaaagcccgtgaagcccagcgcaatcagtacgattctggcgatcagtacaacgatgatgaaatcgatgcgatgcagcaggatgaactggcacgtcagttcgcccagacacagcagcaacgctatggcgaacagtatcaacatgatgtgcccgtaaacgcagaagatgcagatgctgcggcagaggctgaactggctcgtcagtttgcgcaaactcaacaacaacgttattccggcgaacaaccggctggggcgaatccgttcagcctggatgattttgaatttagcccaatgaaagcgttgctggatgatggtccacacgaaccgttgtttacgccaattgttgaacctgtacagcagccgcaacaaccggttgcaccgcagcagcaatatcagcagccgcaacaaccagttccgccgcagccgcagtatcagcagccacaacagccggttgcgccgcagccacaatatcagcagccgcaacaaccggttgcgccacagcagcaatatcagcagccgcaacaaccggttgcgccgcagcagcagtatcagcagccacaacagccagttgcgccacaaccgcaggataccctgcttcatccgctgttgatgcgtaatggcgacagccgtccgttgcataaaccgacgacgccgctgccttctctggatttgctgacaccgccgccgagcgaagtggagccggtagatacctttgcgcttgaacaaatggctcgcctggtggaagcgcgtctggctgatttccgtattaaagccgatgtcgtcaattactctccggggccggttatcactcgctttgaattgaacctggcaccgggcgtaaaagcggcgcgcatttctaacttgagtcgggaccttgcccgtagtcttagcacggtggcggtgcgtgtcgttgaagttattcctggcaaaccctatgtaggtctggagttaccgaataaaaaacgacaaaccgtttatctgcgcgaagttttggataacgccaaattccgcgataatccgagcccattaaccgtggtgctgggtaaagatatcgccggtgagccggtggttgccgatctggcgaaaatgccgcacttgttggttgcggggactaccggttccggtaaatctgtcggtgtgaacgcgatgatcctgagcatgctttataaagcacagccagaagatgtgcgtttcatcatgatcgacccgaaaatgctggagcttagcgtttatgaaggcattccgcatctgttaacggaagtcgttactgatatgaaagatgccgccaacgcgctgcgctggtgtgttaacgagatggagcgtcggtataaactgatgtctgcgctgggtgtgcgtaatctggcgggttataacgaaaaaattgctgaagccgatcgcatgatgcgtccgattccagacccgtactggaagccgggtgacagtatggatgcccagcatccggtgctgaaaaaagaaccatacattgtggtgttggttgacgaatttgccgacctgatgatgacggtaggtaaaaaagtggaagagctgatagcacgtctggcgcaaaaagcccgtgccgcgggtatccacctcgtactggcaactcagcgtccaagcgttgatgttattactggtctgattaaagcgaatattccgacccgtatcgcctttaccgtatccagtaagattgacagtcgtaccattcttgatcaggctggcgcggaaagtctgctgggtatgggggatatgctctactctgggccgaactccacgttgccggtacgtgtccatggtgcttttgttcgcgatcaggaagttcatgccgtggtgcaggactggaaagcgcgtggtcgcccacagtatgttgatggcatcacctccgacagcgaaagcgaaggtggtgcgggtggtttcgatggcgctgaagaactggatccgttgttcgatcaggcggtgcagtttgtcactgaaaaacgcaaagcgagtatttctggcgtacagcgtcagttccgcattggttataaccgtgcagcgcgtattatcgaacagatggaagcgcaggggattgtcagcgaacaggggcacaacggtaatcgtgaagtgctggccccaccgccgtttgactaactaatgcatcgtatgccggataaggcgcggtagcgtcgcatccggcactctatcaactgaaaattcagtattttcttctttcctcaagctgattattagcctggaatagagagtagagggaactcccgatcgggagtgacgtaatttgaggaataatgatgaaaaaaattgccatcacctgtgcattactcagtagcttagtagcaagcagcgtttgggctgatgccgcaagcgatctgaaaagccgcctggataaagtcagcagcttccacgccagcttcacacaaaaagtgactgacggtagcggcgcggcggtgcaggaaggtcagggcgatctgtgggtgaaacgtccaaacttattcaactggcatatgacacaacctgatgaaagcattctggtttctgacggtaaaacactgtggttctataacccgttcgttgagcaagctacggcaacctggctgaaagatgccaccggtaatacgccgtttatgctgattgcccgcaaccagtccagcgactggcagcagtacaatatcaaacagaatggcgatgactttgtcctgacgccgaaagccagcaatggcaatctgaagcagttcaccattaacgtgggacgtgatggcacaatccatcagtttagcgcggtggagcaggacgatcagcgcagcagttatcaactgaaatcccagcaaaatggggctgtggatgcagcgaaatttaccttcaccccgccgcaaggcgtcacggtagatgatcaacgtaagtaaaggcacctgagtgagcaatctgagcctcgattttagcgataatacttttcaacctctggccgcgcgtatgcggccagaaaatttagcacagtatatcggccagcaacatttgctggctgcggggaagccgttgccgcgcgctatcgaagccgggcatttacattctatgatcctctgggggccgccgggtaccggcaaaacaactctcgctgaagtgattgcccgctatgcgaacgctgatgtggaacgtatttctgccgtcacctctggcgtgaaagagattcgcgaggcgatcgagcgcgcccggcaaaaccgcaatgcaggtcgccgcactattctttttgttgacgaagttcaccgtttcaacaaaagccagcaggatgcatttctgccacatattgaagacggcaccatcacttttattggcgcaaccactgaaaacccgagctttgagcttaatagcgcactgctttcccgtgcccgtgtctatctgttgaaatccctgagtacagaggatattgagcaagtactaactcaggcgatggaagacaaaacccgtggctatggtggtcaggatattgttctgccagatgaaacacgacgcgccattgctgaactggtgaatggcgacgcgcgccgggcgttaaatacgctggaaatgatggcggatatggccgaagtcgatgatagcggtaagcgggtcctgaagcctgaattactgaccgaaatcgccggtgaacgtagcgcccgctttgataacaaaggcgatcgcttttacgatctgatttccgcactgcataagagcgtacgtggtagcgcacccgatgcggcgctgtactggtatgcgcgaattattaccgctggtggcgatccgttatatgtcgcgcgtcgctgtctggcgattgcgtctgaagacgtcggtaatgccgatccacgggcgatgcaggtggcaattgcggcctgggattgctttactcgcgttggcccggcggaaggtgaacgcgccattgctcaggcgattgtttacctggcctgcgcgccaaaaagcaacgctgtctacactgcgtttaaagccgcgctggccgatgctcgcgaacgcccggattatgacgtgccggttcatttgcgtaatgcgccgacgaaattaatgaaggaaatgggctacgggcaggaatatcgttacgctcatgatgaagcaaacgcttatgctgccggtgaggtttacttcccgccggaaatagcacaaacacgctattatttcccgacaaacaggggccttgaaggcaagattggcgaaaagctcgcctggctggctgaacaggatcaaaatagccccataaaacgctaccgttaatgttatcgttgcggtaatgttgttactgtatccctgtggtcgcaggctgtggccacatctcccatttaattcgataagcacaggataagcatgctcgatcccaatctgctgcgtaatgagccagacgcagtcgctgaaaaactggcacgccggggctttaagctggatgtagataagctgggcgctcttgaagagcgtcgtaaagtattgcaggtcaaaacggaaaacctgcaagcggagcgtaactcccgaagcaaatccattggccaggcgaaagcgcgcggggaagatatcgagcctttacgtctggaagtgaacaaactgggcgaagagctggatgcagcaaaagccgagctggatgctttacaggctgaaattcgcgatatcgcgctgaccatccctaacctgcctgcagatgaagtgccggtaggtaaagacgaaaatgacaacgttgaagtcagccgctggggtaccccgcgtgagtttgactttgaagttcgtgaccacgtgacgctgggtgaaatgcactctggcctcgactttgcagctgcagttaagctgactggttcccgctttgtggtaatgaaagggcagattgctcgcatgcaccgcgcactgagccagtttatgctggatctgcataccgaacagcatggctacagtgagaactatgttccgtacctggttaaccaggacacgctgtacggtacgggtcaactgccgaaatttgctggcgatctgttccatactcgtccgctggaagaagaagcagacaccagtaactatgcgctgatcccaacggcagaagttccgctgactaacctggtgcgcggtgaaatcatcgatgaagatgatctgccaattaagatgaccgcccacaccccatgcttccgttctgaagccggtagttatggtcgtgacacccgtggtctgatccgtatgcaccagttcgacaaagttgaaatggtgcagatcgtgcgcccagaagacagtatggcggcgctggaagagatgactggtcatgcagaaaaagtcctgcagttgctgggcctgccgtaccgtaaaatcatcctttgcactggcgacatgggctttggcgcttgcaaaacttacgacctggaagtatggatcccggcacagaacacctaccgtgagatctcttcctgctccaacgtttgggatttccaggcacgtcgtatgcaggcacgttgccgcagcaagagcgacaagaaaacccgtctggttcataccctgaacggttctggtctggctgttggtcgtacgctggttgcagtaatggaaaactatcagcaggctgatggtcgtattgaagtaccagaagttctgcgtccgtatatgaacggactggaatatattggctaatacccaatttttctgaatctaaaaagcgcctgcgggcgctttttttgtctccctttgataccgaacaataattactcctcacttacacgtaatactactttcgagtgaaaatctacctatctctttgattttcaaattattcgatgtatacaagcctatatagcgaactgctatagaaataattacacaatacggtttgttactggaatcaatcgtgagcaagcttgagtgagccattatgaaaacgaaaatccctgatgcggtattggctgctgaggtgagtcgccgtggtttggtaaaaacgacagcgatcggcggcctggcaatggccagcagcgcattaacattaccttttagtcggattgcgcacgctgtcgatagcgccattccaacaaaaagtgacgaaaaggttatctggagcgcctgtacagttaactgtggtagtcgctgcccgctacgtatgcacgtcgtggacggtgaaatcaaatatgtcgaaacggacaataccggcgatgacaattacgacggcctgcaccaggttcgcgcctgcctgcgtgggcgttccatgcgtcgccgtgtctacaatccggaccgcctgaaatatccgatgaaacgagtcggggcgcgcggtgaaggcaaattcgagcgcattagctgggaagaagcctacgacatcatcgcgaccaatatgcagcgcctgatcaaagagtacggcaacgagtctatctatctgaactatggcaccggtacgctgggcggcaccatgacccgctcctggccgccgggaaataccctggtcgcgcggctgatgaactgctgcggcggctatctgaaccattacggcgactactcctccgcgcaaattgcggaaggtttgaactatacctacggcggctgggcagatggcaacagcccgagcgatatcgaaaacagtaagctggtagtgctgtttggtaataaccctggcgaaacgcgaatgagtggcggtggggtgacttactatcttgaacaggcacgccagaaatctaatgcccgcatgatcatcatcgatccgcgctataccgacaccggtgccgggcgcgaagatgagtggatccctattcgtccgggaacagatgccgcactggttaacggtctggcgtacgtcatgatcactgaaaacctggtggatcaggcattcctcgataaatattgcgttggctacgatgagaaaaccctgccagccagtgcgccgaaaaatggccactataaagcttatattctgggtgaagggccagatggcgtggctaaaacgccggaatgggccagccaaatcactggtgttccggcagacaaaatcatcaaattggctcgtgaaatcggtagtaccaaaccggcgtttatcagccagggatggggcccgcagcgtcacgctaacggtgaaatcgcaacccgtgctatcagcatgctggcgattctgaccggtaacgttggtattaacggaggcaacagcggcgcgcgtgaaggtagttacagcttaccgtttgtccgtatgccgaccttggaaaacccgatccagaccagcattagcatgtttatgtggaccgatgccattgaacgtggcccggaaatgacggcgctgcgtgatggtgtacgcgggaaagataagctggatgtgccgatcaaaatgatctggaactatgccggtaactgcctgattaaccagcattctgaaatcaaccgtacccatgaaatccttcaggatgataagaagtgcgagctgattgtggttatcgactgccacatgaccagtagcgcgaaatatgctgacatcctgctgcctgactgcaccgcttccgaacagatggactttgcgctggatgcatcctgcgggaatatgtcttacgtgattttcaacgatcaggtgattaaaccgcgctttgaatgtaagaccatctatgaaatgaccagcgaactggcaaaacgtcttggcgttgagcaacagtttactgaaggccgtacccaggaagagtggatgcggcatctgtatgcccagagccgggaagcgattcctgaactgccaacgtttgaagagttccgcaagcaggggatctttaaaaagcgcgacccacaagggcatcacgttgcttataaagccttccgtgaagatccgcaggcaaacccactgactacgccaagcggcaaaattgagatttatagccaggcgctggctgacattgccgctacctgggaattgcctgaaggcgatgtgatcgatccactgccgatctacacgccgggctttgaaagttatcaggatccgctgaacaaacagtatccgctgcagcttacaggtttccactataaatctcgcgttcacagtacttacggcaacgttgatgtgctgaaagcggcttgccgtcaggaaatgtggatcaacccgcttgatgcccaaaaacgcggtatccacaacggcgataaagtcaggatctttaacgatcgtggtgaggttcatattgaggcgaaagtgacgccacgaatgatgccgggtgtggtcgcactgggtgaaggtgcctggtatgacccggatgcaaaacgtgtcgataagggtggttgtattaacgtactgaccactcaacgtccgtctcctctcgctaaggggaatccgagtcatacaaaccttgttcaggttgaaaaggtgtaaggagtaaccgatgacaacccagtatggattttttattgattccagccgttgcaccggttgcaaaacctgcgagctggcctgtaaagactacaaagatttgacgccagaagtcagcttccgccgcatttatgaatatgctggcggcgactggcaggaagataacggtgtctggcaccagaacgtgtttgcctactatctgagcattagttgtaaccactgcgaagatccggcttgtactaaagtctgcccgagcggtgcgatgcataaacgtgaagatggttttgttgtggtcgatgaagatgtgtgcattggctgccgctactgccatatggcttgcccgtatggcgcaccgcaatataacgaaacgaaaggccatatgaccaaatgcgatggttgttatgaccgtgttgcggagggtaaaaagccgatctgtgttgaatcttgtccgctgcgggcgctggatttcggccctatcgacgagctgcgtaaaaaacatggcgatctggcggccgttgcgccgttgccgcgagctcactttaccaaaccgaatattgtgatcaaacccaatgccaatagccgcccgaccggggataccactggctatctggcaaacccgaaggaggtgtgagatgggaagtggatggcatgaatggccgctgatgatcttcacggtcttcgggcaatgtgtagcaggtggttttatcgttctggctttggcgctgctcaaaggcgacctgcgagcagaagcccagcagcgtgttatcgcctgcatgtttggtttatgggtgctgatgggcattggctttatcgcctctatgctccatcttggtagtccaatgcgcgcttttaacagcctcaaccgggtaggggctagtgcactcagtaacgaaatcgccagcggtagcatcttttttgccgtaggcggcatcggctggttgctggcaatgctgaaaaagctgagtccggcattgcgtacgctgtggctgatagtgacgatggttcttggcgtcatctttgtctggatgatggtgcgtgtgtataacagcattgataccgttccgacctggtacagcatctggacgccgatgggcttcttcctgacgatgtttatgggcggcccgttactgggttacctgttgttgagtctggctggcgtcgatggctgggcgatgcgtctgctgccagcaatttctgtactggcactggtagtgagtggcgtggtgagtgtgatgcagggcgcagagctggcgactattcatagttctgtgcagcaggccgcagcgctggtgccggactatggtgcgctgatgtcctggcggatcgtgcttttggccgttgccctgtgcttgtggattgcaccacagctaaaaggttatcagcctgcggttccgctactttctgtaagtttcattctgcttctggcaggggaattaatcggtcgcggcgtattctatggtttgcatatgaccgtggggatggccgtcgcaagctaatcataacaaccggggtttcggccccggttctcttttatttctgcttcgttaacgtgtcataactggtcatcaaattacgataatcaggaatgtggttagagaacaacgtcgccagtccttcaatatcattacgccagtcgcgatgcagctcgcacgccacgccgaaccatgtcatcaattgcgcaccagcttggctcaagcgatcccatgcgctatgccgggtaatttcattaaaggtcccactcgcgtcagtcacgacaaagacgtcaaacccttcttcaatggcactaagcgccgggaatgccacgcaaacttcggttaccacaccggcaataattaactgttttttacctgtcgctttgacagcttttacaaaatcttcgttatcccaggcgttaatatttcccgggcgagcaatgtaaggtgtatcggggaattgtgctttcagttctggaactaatgggccgttaggaccggtttcaaaactggtggtaagaatagttggtaagttgaaatacttagccaggtcacccagcgccagcacgttatttttaaacttatcgggttcgatatcccgtacaagggaaagtaaaccagcctggtgatcaacaagcaaaacggcagcatcatttttatcaagacgaacatacggtttggtcatcctcttctcctttcgagagtcagtggtacgtctgaaatcgatcagacgcgatgcattgctctgaaagcatagacgggaaatatgagtttgctgtgaccatgaaatttttcgactgaacgaagcgtatgaaatttgtgttagttcaataaaaacaatcagatgagactaatcatctcttcagcattagcgttatgaatgagtaatataaatcgataataccgccgctgggatatcgcgtattttcacccattgacaatgtttttggcggtggcatgatgcgcatgaaatttgaacttcctcacggttttaattcatgtccacgtatacccagcctgtcatgcttttgctgtctggcctgcttttgttgactctggcgattgcggtgttaaatacactcgtgccgctttggctcgcccaggaacacatgtccacatggcaggtaggcgttgtcagcagttcctattttaccggcaaccttgtcggtacattgctgacagggtatgtcattaagcgcattggctttaaccgcagctattatctggcctccttcatttttgccgctggctgtgccggccttggcctgatgattggattctggagctggttggcttggcgttttgtcgcgggcgtcggctgtgccatgatttgggtggttgttgagagcgcgctgatgtgcagtgggacgagtcgtaaccgtgggcgtttgcttgctgcgtatatgatggtttattacgtgggaacgtttttaggccagttactggtcagcaaagttagtaccgagctgatgtccgtattgccgtgggttacaggtttgacgttggcagggatcttaccgctgttgtttacgcgtgtgctgaatcagcaggctgaaaaccatgatagcacgagtattacgagtatgctaaaactccgtcaggcgcggcttggcgtgaatggctgcattatcagtggaatcgttctgggatctctatatggcctgatgccgctgtacctcaatcacaaaggggtgagcaatgccagcattggtttctggatggcggtactggtcagtgcgggtatccttggacaatggccgattggacgtctggcggataagtttggtcgactgctggtgttgcgtgttcaggtctttgtcgtcattctcggcagtatcgcgatgcttagccaggcggcgatggccccagcgttattcatcctcggtgccgctggctttacgctatatccggtggcgatggcatgggcttgcgagaaagttgaacatcatcaactggtggcgatgaaccaggccttactgttgagctatactgtgggaagtctgcttggcccgagttttaccgctatgctaatgcagaatttctccgataatttattgtttatcatgatcgccagcgtaagctttatctatttgctgatgctgctgcgcaacgccggtcatacgccgaaacccgttgctcacgtgtaaatgaattcaagcagagtgtgaacttactgtttcacactctgcttttttgtttcttctatctgacttgctttattccaaattttattcgtttaaaaataaaatgtgcagcaggttataattttgcatttcgctatttccgcacttcttatttgccgcgcataatccctcgttttaccgatgcccctttaattttggcgaaggatttgtctatggctgggaatgttcaggaaaaacagttgcgatggtacaacattgcgctgatgtcttttatcactgtctggggttttggcaacgttgttaataactatgccaaccaggggctggtggttgtttttagttgggtgtttatctttgcactctatttcacaccttatgcgctaattgttggtcagttaggcagcaccttcaaagatgggaagggcggggtcagtacctggattaaacacacgatgggacccggactggcttatctcgccgcgtggacctactgggtggtgcatattccctatctggcacaaaaaccccaggcaattctgattgcgctcggttgggcgatgaaaggcgacggtagcctaatcaaagaatatagtgtcgtagcgttacaggggttaacgctggtgctgtttatcttctttatgtgggttgctagtcgcggtatgaaaagcctgaaaatcgtcggttctgtggcagggattgctatgtttgttatgagtctcctgtatgtggcgatggcggtaaccgcgcctgcaattactgaagtgcatattgcgaccacaaacattacctgggaaacgttcattcctcatatcgactttacctacattaccactattagtatgctggttttcgcggttggcggagcagagaagatttctccttacgttaatcaaacgcgcaacccaggaaaagaatttccaaaagggatgttatgcctggcggtgatggttgcggtttgtgccattctgggcagcctggcgatggggatgatgtttgatagccgtaatatcccggatgacttaatgaccaacggtcagtattacgcctttcagaagctgggcgagtattacaacatgggtaatactttaatggtgatttacgccattgcgaataccctgggacaagtagcggcgctggtattcagcattgatgccccgcttaaagtgctattaggtgatgctgacagcaaatatattccagccagtttatgtcgtaccaacgcttctggtacgcccgttaatggctattttctgaccctggtactggtggcgattctgattatgctgccgactctcggcattggtgatatgaacaatctctataaatggctgttgaaccttaatagcgtagtgatgccgctgcgttatttatgggtatttgttgcatttattgcagtcgttcgcttggcgcagaaatataaaccagaatatgtctttattcgtaataagcctctggcaatgaccgtcgggatttggtgttttgcctttaccgcctttgcctgtttgacggggatcttcccgaaaatggaagccttcactgcagagtggaccttccagttggcgctgaatgttgcaacgccgtttgtgctggtaggattaggactgatattcccgctgctggcgcgtaaagcgaatagtaaataattattgtggtcggtgacgctgactctggcagatctgacccgtttttacataatcgagaaatgcgcgcaagccgcaggacatatactggcggtttggataatagatctggaagcctggacgctctgtgctccagtcttccagtacacattctaaacgaccagtatcaaggtactccttgatctgttcatagagcagatacccgataccagcacccatcaaaacggcctccagttcagcatcaacatcatccagaatgatatttcctgcgacagcaatttccagctcctttgcaaattgccagtggaaaggtttgccgctgggataacgaaaaacaacacattgatgattaagcagatcatgaggatggcggggtttgccatatcttgcaaagtactctggcgttgctgctacacataatttcactggcgggccgatcgccacgctgatcatatctttttcgacgatgcaactaagtcgaacgccagcgtcaaagccctgttggacgatatcgacaagagagtcgtcagttgtgagctcgactttaatatcaggatattcacgtgtgaaaccaaccagtaaagacattaaaaatatacgtgcagctacccgggcggcattgattttgagcgttcctgtcggtgtcagacgaaaatcattcatctcatctaacatgatctgaatttcgtcgaaagctgggcgcaatcgttcatagagattagaacccgcttccgttaagcttacgcttcgggttgtccgattgaataagcgaattttaagacgttgttccagtgttttaatactatggctaatggcggagctggataagcctaactcatcgcccgctgcacgaaagctttgattacgggccacggcaaagaaagtggcaaagtcagacatattcatccgcattagtgaaaatccttcattaactcatcctgaatcatcacgtttacaggattatgccgcctgcgtaaagtgcgctccagaacttaacgtggaggtaaaattatgcagtctgaacgtatttatttggtatgggcccatcctcgtcatgatagtttgaccgcacatattgctgatgcgatccatcagcgggcaatggagcggaaaatacaggtgacggaactcgatttatatcggcgtaatttcaacccagtgatgacgccggaagatgaaccagactggaagaatatggataaacgttattctccagaggttcatcagctttatagtgagctgcttgaacatgacacgttagtggtggtttttcctctctggtggtacagcttcccggcaatgctaaaaggatatattgacagagtatggaataatgggctggcttatggagatgggcacaaattaccattcaataaagttcgttgggtggcgctggttggaggagacaaagaaagttttgtccagatgggctgggaaaaaaatataagcgattatttaaaaaatatgtgcagttatcttggtattgaagatgccgatgtcactttcttgtgtaatacagtggtattcgatggggaagaacttcacgcgagctattatcagagcttattatctcaggtacgggatatggtagatgcactataagatgtgttaaaaacgctgtagcagaatgaagcgcggaataaaaaagcggcaactcaataaagttgccgctttacggggaaattagaacattaccttatgaccgtactgctcaagaatgcctttcacgcgttccatggtctctttcttcggtggtttaacaccgtcgagtttgtactcttcacccattgccacccatttgtgtttgcccagctcgtggtaggggagaagctcgattttctcaacgttgcccatatcacgggtaaattcaccgaggcgatgcgcactatcgtcatcgtcagaccagcctgggacaacaacgtagcggatccacaccttcacatttttgttcgccagatatttagcgaactccagcgtgcggtggttggaaactccaaccagattttggtggatctcgtcgttcatctgtttgagatcgagcattaccaggtcggttacttccagcagttcatcaatcaccggatcgtaacgacgaacaaaaccgttggtgtccagacaggtatgaatgccttcttttttgcaggcgcggaaccagtcacgaacaaactcagcttgcaggattgcttcaccgccggatgcggtaacgccgccgccggaagcgttcataaagtggcgataggtcaccacttccttcatcaaatcttcaacggtaacttctttaccgccatgcgtgtcccaggtgtcgcggttatgacaatacaggcagcgcatcaggcagccctggaaaaaggtgataaagcgaatacctgggccgtctacggttccacaggattcaaaggagtgaatgcgaccaataacactcattgcggtgtttctccagatgtggcccatctgaggccgtgttggtgcgcagctcgaaggctacgtcgagtctgttttggcagtcaccttaaagtatagatagctgacaaaaaaggctctcgcgctaaaaaaggccccactttcgtggagcctttattgtacgctttttactgtacgatttcagtcaaatctaattacatagattgagtgaaggtacgagtaataacgtcctgctgctgttctttagtcaggctgttgaaacgtactgcgtagccagatacacggatggtcagctgcggatatttttccgggttttccatcgcgtcgagcagcatttcacggttcatcacgttaacgttcaggtgctgaccaccttcgatggatgcttcgtggtggaagtaaccatccatcagaccagccaggttggtcttacgaacttcgtcgtctttacccagtgcgttcggaacgatagagaaggtgtaggagataccatctttagcgtaagcaaacggcagtttagcaacggaagtcagagaggctactgcacctttctggtcacgaccgtgcatcgggttagcacccggtccgaacggcgcgccagcacgacgaccgtctggggtgttacccgttttcttaccatacacaacgttagaagtgatggtcagaacagactgagtcgggatagcgtcacggtaggtgtgcagtttctgaattttcttcatgaaacgttctaccaggtcaacagccaggtcatctacacgcggatcattgttaccaaactgcgggtattcgccttcgatttcgaagtcgatagccagaccgtcttcgtcacgaatcggtttaactttcgcatatttgattgcagacagggagtcagcagcaacggacagaccagcgataccacacgccatggtgcggataacgtcacggtcgtgcagcgccatcagagaggcttcgtagctgtacttgtcgtgcatgtagtggatgatgttcagtgcagtgatgtactgtttagccagccagtccatgaagtgatccatgcgctccatcacttcatcatagttcaggacatcgcctttgatcggttcagacttcggaccaacctgcattttcagtttttcgtcaacgccgccgttgattgcgtacagcatggttttcgccaggtttgcacgcgcaccgaagaactgcatttgtttaccaacgatcatcgggcttacgcagcaagcaatagcgtagtcatcgttgttgaagtccggacgcatcaggtcatcgttctcatactgcagagaagaggtgtcgatggacactttagcggcgaatttcttgaagttcagcggcagtttttcagaccacagaatggtcatgttcggttccggagacggacccatggtgtacagggtgttcaggaaacggaagctgtttttggtaaccagggtacgaccgtcgaggcccataccaccgatagattcggttgcccagatcgggtcgccagagaacagttcatcgtattccggagtacgcaggaagcgaaccatacgcagtttcatgaccaggtggtcaaccatttcctgcgcttcttgttcggtgatcttgccagctttcaggtcacgttcgatgtacacatccaggaaggtggaggtacgaccgaaggacattgcagcaccgttctgagacttaacagcagccaggtagccgaagtaagtccactggatagcttcctgagcgttggtagccggaccagagatgtcgtagccgtatttcgcagccatttctttcatctgacccagagcgcggtgctgttcagcgatttcttcgcgcagacggatagtctgttccaggtttacgccgttttccagatcagcctgcagagaagtgaactgtgccagtttgtctttcatcaggtagtcgataccgtacagcgcaacgcgacggtagtcaccgatgatacggccacggccatatgcatctggcagaccggtcagaacaccagatttacggcaacgcaggatgtccggagtgtaaacgtcgaacacgccctggttgtgagttttacggtattcagtgaagatttttttgatcatcggatccagttcgcggttgtacgctttgcaggaaccttcgatcattttgataccaccgaacgggataagagcacgtttcagcggagcttcagtctgcagaccaacgattttctcaagctgcttgttgatgtagccagcgtcgtgagaggtgatggtggaagcaacagcggtgtcaaagtcaactggcgcgtgagtgcggttttccagtttaacgccttccattactttgtcccacagggtggtggtcgcttcagtagcgccagccaggaaggactcgtcaccctcgtacggagtgtagtttttctgaatgaagtcacggacgtttacttcattctgccagtcacctttggtaaaaccttcccaggctgtggctaacttttcattaagctcggacatgtaacacctaccttcttaagtggattttttatttactgcgtacttcgacaaccattaatggtggtcgttttcacgcaggtaaatgacccagtatgtcaacccaaccaacaaaccaccaccgataatgttgccgatcgtaaccggaatcaggttatcagtgatgaaattcatcacggtcaggtgagaaaaattttccggtgcagaaccgactgcggtccaaaattccggggatgcgaagtcgcggattacaatacccatcgggatcataaacatgtttgcgatactgtgctcaaaaccgctggcaacaaacatcgcgaccggcagcaccataatgaacgctttgtccatcaggctgcggccagaataactcatccatactgccagacataccatcaggtttgccaggataccaagacagacggcctcaataaaagtatggtgcactttgtggtcggcggtttgtaggacgtttagtccccattgaccatttgcggtcatatactcgccggaaagccacattaaaagtacaaacagcagtgcgccgaccaggttgccaaaatagacatttagccagtttttcgccaactgaccccaggtgatgcgcccactcgccttagcaacaacaatcaacacggtggaagtaaagagatcggctccgcagacaacacaaagaatcagccccagagagaagcaaatgccgccaaccagttttgccatgccgaagggcattgtgcctgtgccagtggttgctgtgatatagaagacgaatgcgatactgatgaaaacaccggcggtaatcgccagatagaaagtcttaagcggatgtttcgttgctttatagacacccgcctcttcggccactttggccattgcagcaggaagtaaaagatcaaaagggttgtcagctttcacactaactctctctttattaagtcggcgacgagatactaacaaagcattatagatgagaaattgatatagatcatatctcgcctggcttataggcccgtaactcgcatggtttttatgcaaatacggagtaaatatttgattatccaaataaaaataaattttaaaaattaacaaatgagttgaattttttccgcatcctccgctaaaacagttaattaaaagggagcatcaggcgaataaagtaacaatatcgatcgtatttattaaatacaaattaccgatatttaaccttataattacaattattttattaatgcaaatatatgtaaagcggggcattaaaaaaacgccccgtaatataactcagactaatcattaagcctacattgcgtaggctatttgattttattttgcccagaatgctgctttggcgcgctgcagcttttcgtaggccttcaacaagctctgatgtgcagcaaacgcgtgcagatcgctatctaccggttgcaggccgtaaaacgccgcttcgccgctcattgccgcactggcggcttctacggcatctgcgccgtacatgcgaacaaacgcattcagatattgcagcggctggcgatcttcttcctgtgccagtaataacaacgtttgcaggcagcgataatagttggcgcgttccggactaaatacactactgttaaactccatcgtccattcggtccagaccagagcctgttccagatcgccaccagccagcgccagcatggcttttaattcaccgatacgcagggtgtaccaaccgttatcgctcccggtcgccagacccaacagctcacgcacgcgggtaaagtcatcaaaaccttcttcatccagttgctcgatgaggttcaggtaatcttctttttcccactcgctgcctggtaggctaagaatcgtttcacgtaaatggctgcccatactgttattcgcgagccacagatcttcagccggataaatatcggacatgccaggcacgataatacggcaagcataaacgcccagatgctcgtaatcggcaatataaacttctttatcttctttgttgaagatagccatcagtgtggcgaactcttcttccgtggtgccggagaaattccagtccacaaacggataatcggcatcctgcttgaacaggtcccaggagattaaaccgctggaatcgataaagtgcgtttcgaggttggtatgttcagcgacttcttcatcatcgaaggttggcggagtaaacacatccaaatctttcaggccacgaccttgcagcagctcggtcacggtacgttccagtgctacgccaaaatcaggatgcgcaccgaaagaggcaaagcaggtaccgttagcaggattgaacagtaccacgcaaatcaccggatactggccgccaaggctaccgtcataagcgaagattgggaaaccctccgcttccagcgtttcgatggcttcaactactgctgggtaacgcgccagcacgtctgccgggatctctggcaggctgatgctttcagcaataatgcggtttttcacgtagcgttcgaaaacttcagacaatccctgaacgcgtgcttcgttgcgggtattacctgcggacataccgttggagacgtacaggttaccaatgatattcatcggaatataaacggtctgattgtcggactgacgcgtaaacggcaggccgcaaataccacgatcttcgttaccggattgtaggtcaatcagcatgctgccggtcagttcattctccggatcataaaacgcgcgcagacggtcatcgagcagcccttctggcacatcgtcattttcggtcagtgggaaccatttttcgttgggataatgcacgaacggaccgttggcgatggtttcgcccagccagaagtccgcaaaaaagtagttggtactgagacgctcgaaatattcaccgagtgcagaagccagcgccgctttcttggttgcgcctttaccgttggtaaaacacagtgcgcactctttgtcgcgaatatgtacagaccagacgttaggcacgggattcagccaggaggcctcttcaatctgaaagccgaggtcactaagtttttgctggaagcgagcgatggaatcttccagagcggcatctttgccggggataaatgtttgcgtcatgaaaatcactttagtcgtacggaaagcgcgcaataatacgggttttatctcaaaggcgctatcaccgccgccatgccgatgaactgttgactatgcttttagcggataaaccacgttaagagcataaaaatgaaggcgttcgatctccaccgtatggcatttgataaagtgccttttgatttccttggcgaagttgcactacgtagtctttatacctttgtactggtctttttgttcctcaaaatgaccggaagacgcggtgtgcggcagatgagcctgtttgaagttttaatcattctgacgctgggaagtgcggcgggagatgtggcgttttatgatgatgtgccgatggtcccggtacttatcgtctttattactctggcgttgttataccgcctggtaatgtggttgatggcgcacagtgaaaaactggaagatcttctggaaggcaagccagttgtcattattgaagatggcgagctggcctggagcaaactcaataactccaacatgacggaatttgagttctttatggagctacgattgcgtggcgtggagcagctggggcaggtacgtctggcgattctcgaaaccaacgggcaaatcagtgtctatttctttgaagatgacaaggtgaaaccgggtttacttattttacccagtgattgtacgcagcgttacaaagtggtgccggagagcgcggactatgcctgtattcgttgtagtgaaatcattcatatgaaagcgggggaaaaacaattatgtccgcgctgtgcaaatccagaatggacgaaggcaagtcgggcaaaacgggtgacctgacagtaaaaacatcggctttttgctaataatccgagagattcttttgtgtgatgcaagccacatttttgccctcaacggttttactcattgcgatgtgtgtcactgaatgataaaaccgatagccacaggaataatgtattacctgtggtcgcaatcgattgaccgcgggttaatagcaacgcaacgtggtgaggggaaatggctcaaatcttcaattttagttctggtccggcaatgctaccggcagaggtgcttaaacaggctcaacaggaactgcgcgactggaacggtcttggtacgagcgtgatggaagtgagtcaccgtggcaaagagttcattcaggttgcagaggaagccgagaaggattttcgcgatcttcttaatgtcccctccaactacaaggtattattctgccatggcggtggtcgcggtcagtttgctgcggtaccgctgaatattctcggtgataaaaccaccgcagattatgttgatgccggttactgggcggcaagtgccattaaagaagcgaaaaaatactgcacgcctaatgtctttgacgccaaagtgactgttgatggtctgcgcgcggttaagccaatgcgtgaatggcaactctctgataatgctgcttatatgcattattgcccgaatgaaaccatcgatggtatcgccatcgacgaaacgccagacttcggcgcagatgtggtggtcgccgctgacttctctagtaccattctttcccgtccgattgacgtcagccgttatggtgtaatttacgctggcgcgcagaaaaatatcggcccggctggcctgacaatcgtcatcgttcgtgaagatttgctgggcaaagcgaatatcgcgtgtccgagcattctggattattccatcctcaacgataacggctccatgtttaacacgccgccgacatttgcctggtatctatctggtctggtctttaaatggctgaaagcgaacggcggtgtagctgaaatggataaaatcaatcagcaaaaagcagaactgctatatggggtgattgataacagcgatttctaccgcaatgacgtggcgaaagctaaccgtagccggatgaacgtgccgttccagttggcggacagtgcgcttgacaaattgttccttgaagagtcttttgctgctggccttcatgcactgaaaggtcaccgtgtggtcggcggaatgcgcgcttctatttataacgccatgccgctggaaggcgttaaagcgctgacagacttcatggttgagttcgaacgccgtcacggttaatgccgaaattttgcttaatccccacagccagcctgtggggtttttatttctgttgtagagagttgagttcatggaatccctgacgttacaacccatcgctcgtgtcgatggcactattaatctgcccggttccaagagcgtttctaaccgcgctttattgctggcggcattagcacacggcaaaacagtattaaccaatctgctggatagcgatgacgtgcgccatatgctgaatgcattaacagcgttaggggtaagctatacgcttagtgccgatcgtacgcgttgcgaaattatcggtaacggcggtccattacacgcagaaggtgccctggagttgttcctcggtaacgccggaacggcaatgcgtccgctggcggcagctctttgtctgggtagcaatgatattgtgctgaccggtgagccgcgtatgaaagaacgcccgattggtcatctggtggatgcgctgcgcctgggcggggcgaagatcacttacctggaacaagaaaattatccgccgttgcgtttacagggcggctttactggcggcaacgttgacgttgatggctccgtttccagccaattcctcaccgcactgttaatgactgcgcctcttgcgccggaagatacggtgattcgtattaaaggcgatctggtttctaaaccttatatcgacatcacactcaatctgatgaagacgtttggtgttgaaattgaaaatcagcactatcaacaatttgtcgtaaaaggcgggcagtcttatcagtctccgggtacttatttggtcgaaggcgatgcatctagcgcttcttactttctggcagcagcagcaatcaaaggcggcactgtaaaagtgaccggtattggacgtaacagtatgcagggtgatattcgctttgctgatgtgctggaaaaaatgggcgcgaccatttgctggggcgatgattatatttcctgcacgcgtggtgaactgaacgctattgatatggatatgaaccatattcctgatgcggcgatgaccattgccacggcggcgttatttgcaaaaggcaccaccacgctgcgcaatatctataactggcgtgttaaagagaccgatcgcctgtttgcgatggcaacagaactgcgtaaagtcggcgcggaagtggaagaggggcacgattacattcgtatcactcctccggaaaaactgaactttgccgagatcgcgacatacaatgatcaccggatggcgatgtgtttcagcctggtggcgttgagtgatacaccagtgacgattcttgatcccaaatgcacggccaaaacatttccggattatttcgagcagctggcgcggattagccaggcagcctgaatgaacaacgggcaataaatagccaaatctttctttatcaaaacgtcggcacattgtcggcgttttttttcggaccttgtgagtcattttgattaatggtagcgtcgcttgtcaatgtaagttgttgatacataatatttatatatgattaatcaacggatgattcacatgaagaatactaaattactgctggcgattgcgacctctgcagcattactgacagggtgtcaaaatacccacggtattgataccaatatggctatcagctccggtttaaatgcctataaagcagcaacattaagcgatgccgatgcaaaagcgattgccaatcagggctgtgccgaaatggacagcggcaatcaagtcgcaagtaaatccagcaagtacggtaaacgtctggcaaaaatcgccaaagcattgggtaacaatattaatggcacgccggtcaactataaggtttatatgaccagcgacgtcaacgcatgggcgatggcgaacggctgtgttcgtgtctacagtggcctgatggacatgatgaatgacaacgaaattgaaggcgttctgggccatgaactgggccacgtcgcgttgggtcacagcctggctgaaatgaaagcttcttatgcgatcgttgccgcacgcgatgccattagtgctaccagcggtgtggcttcccagctttcccgcagtcaattaggtgatatcgcagaaggcgctatcaatgctaaatactcccgtgataaagagtccgaagcagatgatttctcctttgatctgttgaagaaacgtggcatcagcacccaggggctggttggcagctttgaaacactggctagcctggatggcggtcgcacccagtccatgtttgactctcacccaccaagtacagagcgtgcgcaacacatccgtgatcgtatcgcctctggtaagtaaatcattgtcatctttcgggctggtcttctgccagcccgctataattgcgcaataaatccccatctgaatacagacaaaactggtttttgcacacaacgttaacgatttgtggcgtcggcgcgtataatgcgcgcggttatgttaacggtacgcctgttttaaggagataaagatgacggcaattgccccggttattaccattgatggcccaagcggtgcagggaaaggcaccttgtgtaaggctatggcggaagcgttgcaatggcatctgctggacagcggtgcaatttatcgcgtactggcattggcggcattacatcaccatgttgatgttgcgagcgaagatgcgctggtaccgctggcatcccatctggatgtacgttttgtgagcaccaatggcaatctggaagtgatcctcgaaggggaagatgtcagcggcgaaattcgtactcaggaagtggcgaatgcagctagtcaagtcgcggcattcccacgcgttcgtgaagcattattgcgtcgccaacgcgcgtttcgcgaattaccaggtctgattgccgatggccgcgacatgggaacggtggtattccctgatgcaccagtgaaaattttccttgacgcctccagcgaagaacgtgcgcatcgccgcatgctacagttgcaggagaagggctttagtgttaactttgagcgccttttggccgagatcaaagaacgcgacgaccgcgatcgtaaccgagcggtagcgccactggttccggcagccgatgctttagtgttggattccaccaccttaagcattgagcaagtgattgaaaaagcgctacaatacgcgcgccagaaattggctctcgcataagcgaccgaatttgcagtacccccgttgcaatggaatgacagcgggtatgttaaacaaccccatccggcatggagccaggtggacgttaaatataaacctgaagattaaacatgactgaatcttttgctcaactctttgaagagtccttaaaagaaatcgaaacccgcccgggttctatcgttcgtggcgttgttgttgctatcgacaaagacgtagtactggttgacgctggtctgaaatctgagtccgccatcccggctgagcagttcaaaaacgcccagggcgagctggaaatccaggtaggtgacgaagttgacgttgctctggacgcagtagaagacggcttcggtgaaactctgctgtcccgtgagaaagctaaacgtcacgaagcctggatcacgctggaaaaagcttacgaagatgctgaaactgttaccggtgttatcaacggcaaagttaagggcggcttcactgttgagctgaacggtattcgtgcgttcctgccaggttctctggtagacgttcgtccggtgcgtgacactctgcacctggaaggcaaagagcttgaatttaaagtaatcaagctggatcagaagcgcaacaacgttgttgtttctcgtcgtgccgttatcgaatccgaaaacagcgcagagcgcgatcagctgctggaaaacctgcaggaaggcatggaagttaaaggtatcgttaagaacctcactgactacggtgcattcgttgatctgggcggcgttgacggcctgctgcacatcactgacatggcctggaaacgcgttaagcatccgagcgaaatcgtcaacgtgggcgacgaaatcactgttaaagtgctgaagttcgaccgcgaacgtacccgtgtatccctgggcctgaaacagctgggcgaagatccgtgggtagctatcgctaaacgttatccggaaggtaccaaactgactggtcgcgtgaccaacctgaccgactacggctgcttcgttgaaatcgaagaaggcgttgaaggcctggtacacgtttccgaaatggactggaccaacaaaaacatccacccgtccaaagttgttaacgttggcgatgtagtggaagttatggttctggatatcgacgaagaacgtcgtcgtatctccctgggtctgaaacagtgcaaagctaacccgtggcagcagttcgcggaaacccacaacaagggcgaccgtgttgaaggtaaaatcaagtctatcactgacttcggtatcttcatcggcttggacggcggcatcgacggcctggttcacctgtctgacatctcctggaacgttgcaggcgaagaagcagttcgtgaatacaaaaaaggcgacgaaatcgctgcagttgttctgcaggttgacgcagaacgtgaacgtatctccctgggcgttaaacagctcgcagaagatccgttcaacaactgggttgctctgaacaagaaaggcgctatcgtaaccggtaaagtaactgcagttgacgctaaaggcgcaaccgtagaactggctgacggcgttgaaggttacctgcgtgcttctgaagcatcccgtgaccgcgttgaagacgctaccctggttctgagcgttggcgacgaagttgaagctaaattcaccggcgttgatcgtaaaaaccgcgcaatcagcctgtctgttcgtgcgaaagacgaagctgacgagaaagatgcaatcgcaactgttaacaaacaggaagatgcaaacttctccaacaacgcaatggctgaagctttcaaagcagctaaaggcgagtaattctctgactcttcgggatttttattccgaagtttgttgagtttacttgacagattgcaggtttcgtcctgtaatcaagcactaagggcggctacggccgcccttaatcaatgcagcaacagcagccgcttaatttgcctttaaggaaccggaggaatcatgaccaagagtgaattgatagaaagacttgccacccagcaaagccacattcccgccaagacggttgaagatgcagtaaaagagatgctggagcatatggccagcactcttgcgcagggcgagcgtattgaaatccgcggtttcggcagtttctctttgcactaccgcgcaccacgtaccggacgtaatccgaagactggcgataaagtagaactggaaggaaaatacgttcctcactttaaacttggtaaagaactgcgcgatcgcgccaatatttacggttaagttttttactcaaacttgaacgagagaaaagcacctgtcgggtgcttttttcatttctctaatctggaactggaagctgcctcgcagagttttgaacagttttcaccctttcgttaaattcttctgaatatgcctcggggaacgcaaaattcccaccagacaaccgctcaacaaagttgcacactttccataaacagggaggggtgcatgaaaataacgacagtcggtgtatgcataattagcggaatttttccgttgctgattttgccccaattgcctgggacattaacccttgcgtttctgactctcttcgcctgcgtactggcatttatccctgttaaaaccgtccgttatatcgcgctgacgttgctgtttttcgtttggggcatattaagtgcaaagcaaattttgtgggcaggagaaaccttaactggcgcgacgcaggatgcaattgttgagatcactgcaactgacggcatgaccactcattacggtcaaattactcatctacaaggtcgacgtatattccctgcgagtggtctcgtgatgtatggcgaatatcttccgcaagcggtttgtgctggacaacaatggagtatgaaactcaaagttcgtgcagttcatggccaacttaatgatggcggctttgatagccagcgttatgccattgcccagcatcagccgctcaccggccgttttctgcaggcaagtgtcattgaaccgaattgtagcctgcgtgcacagtatctggcgagtctacaaacaacgctgcaaccctatccgtggaatgcggttattcttggtttaggtatgggggaacggttatccgtccccaaagaaatcaaaaatatcatgcgcgatactggaacggcgcatttaatggcgataagcggattgcacatcgcttttgcggcgttgctggctgccggactcattcgcagtggacaaatttttctgcctgggcgctggatccactggcaaataccattaattggcggaatctgctgtgctgctttttatgcctggttgacgggaatgcaacctcctgcattgcgtaccatggtggcgcttgctacgtggggaatgcttaagttaagtgggcgacagtggagtggctgggatgtatggatatgttgtctggcggcaattttgctgatggatcctgttgccattctcagccaaagtttatggctctctgccgctgcggtcgcggcattgatattttggtatcagtggtttccctgtcctgagtggcaactgccgccggtattgcgtgcagttgtttccctcatccatctgcaactgggaatcacacttctgcttatgcccgtgcaaatcgtcatatttcatggcattagtctgaccagctttattgcaaatctattagcaattcccttggtgacatttatcacggttccgttgatcctcgccgcgatggttgtgcatttaagcgggccgttaatcctggagcaagggttatggtttcttgccgaccggtctttggctttacttttctgggggttaaagagtttgccggaagggtggatcaacattgctgaatgttggcaatggctaagtttttccccatggttcttactggtggtatggcgattaaacgcctggcgaacgttgccagcaatgtgtgtggctggaggcttgctgatgtgctggccgctgtggcaaaaacctcgacctgacgagtggcagctgtacatgcttgatgtcgggcaagggctggcaatggtgatagccagaaacggcaaagcgattctctatgacacaggactggcctggcctgaaggggatagtgggcaacaactgattatcccctggctccactggcataatcttgaaccggaaggcgttattctgagccatgaacatctggatcaccggggagggctggatagtatattgcatatatggccgatgttatggatcagaagtccgttaaactgggaacatcatcagccctgtgtgcgtggcgaagcgtggcaatggcaaggattgcgtttcagcgcgcactggcctttacaaggtagcaacgataaaggaaataaccattcctgtgtggttaaggttgatgacgggacgaatagcattcttctaaccggtgatattgaagccccagctgaacaaaagatgctaagccgttactggcagcaagtgcaggcaacattgcttcaggtacctcaccatggcagtaataccagtagtagcttgccattaattcagcgagtgaatggaaaagtggcactcgcaagcgcaagccgctataacgcatggcgactgccctctaacaaagttaagcatcgctatcaactgcaaggatatcaatggattgatactccacatcaaggtcaaacaacggtcaattttagtgcgcaaggctggcggattagcagcctcagggagcaaattttacctcgttggtatcatcagtggtttggcgtgccagtggataacgggtaaaatatgcggctatttcaacaaatgctggttttttgaatgcataacgacaaagatctctctacgtggcagacattccgccgactgtggccaaccattgcgcctttcaaagcgggtctgatcgtggcgggcgtagcgttaatcctcaacgcagccagcgataccttcatgttaagcctccttaagccacttcttgatgatggctttggtaaaacagatcgctccgtgctggtgtggatgccgctggtggtgatcgggctgatgattttacgtggtatcaccagctatgtctccagctactgtatctcctgggtaagtggaaaggtggtaatgaccatgcgtcgccgcctgtttggtcacatgatgggaatgccagttagtttctttgacaaacagagtacgggtacgctgttgagtcgtattacctacgattccgaacaggttgcttcttcttcttccggcgcactgattactgttgtgcgtgaaggtgcgagcatcatcggcctgttcatcatgatgttctattacagttggcaactgagcatcattttgattgtgctggcaccgattgttagcattgcgattcgcgttgtaagcaagcgttttcgcaacatcagtaaaaacatgcagaacaccatggggcaggtgaccaccagcgcagaacaaatgctgaagggccacaaagaagtattgattttcggtggtcaggaagtggaaacgaaacgctttgataaagtcagcaaccgaatgcgtcttcaggggatgaaaatggttagtgcctcttccatctctgatccgatcattcagctgatcgcctctttggcgctggcgtttgttctgtatgcggcgagcttcccaagtgtcatggatagcctgactgccggtacgattaccgttgttttctctagtatgattgcactgatgcgtccgctgaaaagcctgaccaacgttaacgcccagttccagcgcggtatggcggcttgtcagacgctgtttaccattctggacagtgagcaggagaaagatgaaggtaagcgcgtgatcgagcgtgcgactggcgacgtggaattccgcaatgtcacctttacttatccgggacgtgacgtacctgcattgcgtaacatcaacctgaaaattccggcagggaagacggttgctctggttggacgctctggtagcggtaaaagtaccatcgccagcctgatcacgcgtttttacgatattgatgaaggcgaaatcctgatggatggtcacgatctgcgcgagtataccctggcgagcttacgtaaccaggttgctctggtgagccagaatgtccatctgtttaacgatacggttgctaacaacattgcttacgcacggactgaacagtacagccgtgagcaaattgaagaagcggcgcgtatggcctacgccatggacttcatcaataagatggataacggtctcgatacagtgattggtgaaaacggcgtgctgctctctggcggtcagcgtcagcgtattgctatcgctcgagccttgttgcgtgatagcccgattctgattctggacgaagctaccagcgctctggataccgaatccgaacgtgcgattcaggcggcactggatgagttgcagaaaaaccgtacctctctggtgattgcccaccgcttgtctaccattgaaaaggcagacgaaatcgtggtcgtcgaggatggtgtcattgtggaacgcggtacgcataacgatttgcttgagcaccgcggcgtttacgcgcaacttcacaaaatgcagtttggccaatgatcgaaaaaatctggtctggtgaatcccctttgtggcggctattgctgccactctcctggttgtatggcctggtgagtggcgcgatccgtctttgctataaactaaaactgaagcgcgcctggcgtgcccccgtaccggttgtcgtggttggtaatctcaccgcaggcggcaacggaaaaaccccggtcgttgtctggctggtggaacagttgcaacagcgcggtattcgcgtgggggtcgtaagccggggatatggtggtaaggctgaatcttatccgctgttattgagcgcagataccacaacagcacaggcgggtgatgaacctgtgttgatttatcaacgcactgatgcgcctgttgcggtttctcccgttcgttctgatgcggtaaaagccattctggcgcaacaccctgatgtgcagatcatcgtaaccgacgacggtttacagcattaccgtctggcgcgtgatgtggaaattgtcgttattgatggtgtgcgtcgctttggcaatggctggtggttgccggcggggccaatgcgtgagcgagcggggcgcttaaagagcgttgatgcggtaatcgtcaacggcggtgtccctcgcagcggtgaaatccccatgcatctgctgccgggtcaggcggtgaatttacgtaccggtacgcgttgtgacgttgctcagcttgaacatgtagtggcgatggcggggattgggcatccgccgcgcttttttgccacgctgaagatgtgtggcgtacaaccggaaaaatgtgtaccgctggccgatcatcagtctttgaaccatgcggatgtcagtgcgttggtaagcgccgggcaaacgctggtaatgactgaaaaagatgcggtgaaatgccgggcctttgcagaagaaaattggtggtatttgcctgtagacgcacagcttagtggtgatgaaccagcgaaactgcttacgcaactaaccttgctggcttctggcaactaattacgccgcggcagcgttcgattgatggagtcatgaatgagcctgccgcacctctcccttgctgatgcgcgtaatcttcaccttgccgcacaaggcctgttaaacaaaccccgccgtcgagcgagcttggaggatattccggcaacgatctcccgcatgtccttgctgcaaatcgataccatcaatattgttgcccgtagtccatatctggtgcttttcagtcgtctgggaaattatcctgcccagtggctggatgagtctctggcgcgtggcgaattaatggaatactgggcgcatgaagcctgctttatgccgcgtagcgactttcgtcttattcgccaccgcatgctggcacctgaaaaaatgggctggaaatacaaagacgcctggatgcaggaacatgaggcggaaattgcacagttaattcagcatattcatgataaggggccggtacgtagtgccgattttgagcatcctcgtaaaggtgcaagcggctggtgggaatggaagccgcataaacggcatctggaaggtttatttactgccggaaaggtgatggtgattgaacggcgcaacttccagcgcgtttatgatttaacccaccgtgtcatgcctgactgggatgatgagcgcgatctcgttagccaaacagaagcagaaatcatcatgctggataacagtgcgcgtagcctgggaatattccgcgaacagtggctggcagattactatcggctgaaacgtccggcactggcggcgtggcgcgaagcgagggctgaacagcagcaaatcattgctgtgcatgttgaaaaattgggcaatctttggctgcatgatgatttgctgccgctactcgagcgagcgctggccggaaagctcactgcaacgcacagcgcggtacttagcccttttgatcctgttgtctgggatcgcaaacgcgcagagcagctttttgattttagctaccggctggagtgctataccccagcgccgaaacgccagtatggctattttgttctgccgttattacatcgtgggcaattagttgggcgaatggatgccaaaatgcatcgccagacaggcatccttgaagttatctctctgtggttacaggaaggtattaaaccaacgacaacgctgcaaaaagggctacgtcaggcgattactgatttcgctaactggcagcaggcaacgcgggtgacattaggatgctgcccgcaaggcctctttactgattgccgcaccggctgggaaatagaccccgtcgcataaatgattatgataagatttatgcattcataacccgatccatctggaggaactatggatcatcgtctgcttgaaatcattgcctgcccggtttgcaacggaaaactttggtataaccaggaaaaacaagagcttatttgcaaactggacaacctcgctttcccgctgcgtgatggcattccagtgttgctggaaacggaagcccgcgtgctgactgctgatgagagtaaaagttgatgtaaactgctgatgagagtaaatcatgagttttgtggtcattattcccgcgcgctacgcgtccacgcgtctgcccggtaaaccattggttgatattaacggcaaacccatgattgttcatgttcttgaacgcgcgcgtgaaagtggtgccgagcgcatcatcgtggcaaccgatcatgaggatgttgcccgcgccgttgaagccgctggcggtgaagtatgtatgacgcgcgccgatcatcagagtggaacagaacgtctggcggaagttgtcgaaaaatgcgcattcagcgacgacacggtgatcgttaatgtgcagggtgatgaaccgatgatccctgcgacaatcattcgtcaggttgctgataacctcgctcagcgtcaggtgggtatggcgactctggcggtgccaatccacaatgcggaagaagcgtttaacccgaatgcggtgaaagtggttctcgacgctgaagggtatgcactgtacttctctcgcgccaccattccttgggatcgtgatcgttttgcagaaggccttgaaaccgttggcgataacttcctgcgtcatcttggtatttatggctaccgtgcaggctttatccgtcgttacgtcaactggcagccaagtccgttagaacacatcgaaatgttagagcagcttcgtgttctgtggtacggcgaaaaaatccatgttgctgttgctcaggaagttcctggcacaggtgtggatacccctgaagatcttgagcgcgttcgcgctgaaatgcgctaatttcacttcacgacacttcagccaattttgggaggagtgtcgtaccgttacgattttcctcaatttttcttttcaacaattgatctcattcaggtgacatcttttatattggcgctcattatgaaagcagtagcttttatgagggtaatctgaatggaacagctgcgtgccgaattaagccatttactgggcgaaaaactcagtcgtattgagtgcgtcaatgaaaaagcggatacggcgttgtgggctttgtatgacagccagggaaacccaatgccgttaatggcaagaagctttagtacgcccggaaaagcccgacaactggcatggaaaaccaccatgctggcaagaagtgggactgtccgtatgccgactatttatggtgtgatgacgcatgaagaacaccccggccccgatgtcctgctactggagcggatgcgtggtgttagcgtggaggcaccagcccgaacaccagaacgctgggaacaactcaaagaccaaatcgttgaagccttactggcctggcaccgtcaggacagtcgcggttgcgtcggcgcggtcgacaatactcaggaaaatttctggcccagttggtaccggcaacatgttgaagtgctatggaccacgctcaatcagttcaataacaccggtctgacgatgcaggataagcggatcctgtttcgcactcgcgaatgtctcccggcattatttgaaggctttaacgacaattgtgtgctgattcacggtaacttctgtttacgcagcatgttgaaagatagccgcagcgatcagttactggcgatggtcgggccgggactaatgctttgggcaccgcgagaatacgaactgttccgactaatggataattctctggcggaagatttgctctggagttacctgcaacgcgcgccagtggcggagagcttcatctggcggcgttggttgtatgtgttatgggatgaagttgcgcaactggttaataccggacgatttagtcggcgcaacttcgatctggcaagtaaaagtctcttgccgtggctcgcctgatcactcttgccgtggctcgccactgctaccttttagccactgccagatacggccaagcgtttcatagccaacacgatcgctatgcatcaaccagaccggagaagggattgcccgttcccacgggttaagcgggctgtcgatggccaactgattcgccggggctggtagcggatttaacccttcctgctgaaaaaagatcatcgcccgcggcagatgacttgcggaggtcaccagcaggaaaggggcgtcaccaatcgcctgtttcactgctgcagcttcttcttcggtatcttttggcaaatccagggtgataatttgctcgcgcggcacgcccaggctttgcgcaactctggcacctacttccgctgtactcaccgtattggtttttgctacgcctcccgtgaagatcagtttacttcccggattttcgcgccataagcgaataccttcattcaggcgtggcagactgttattgattaaattagagctcggtgcccactgcgggttccaggtataaccacctccgagcaccacgatatagtccactttttggctattattccatgtcggataggtgctttcgatgggacgcagcaggcggtcggctaccggttgcaaactcaataacaagagcgccagccacccaatgctaataaaaatcttcccggttttttgaaaacggctaaaccacagcagcgccaggccagcgccaataatcaacaacatcagcggaagtggcagcaacatattgccaatcacttttttcagtgtaaaaagcatcctttctggttccttttttaaccatatagcaagggatcgccagcgatattacaccagacgggttcattctcgccgtggctgtgacaaaatagcgtctttatcagaaaacgtcttagccaaccggtggagaaagcaatgcaggatcgcaattttgatgatattgcggaaaagttttcccgtaacatttacggcaccaccaaagggcagcttcgacaggctattctgtggcaggatctcgatcgcgtgctggcggaaatgggcccgcaaaaactgcgtgtgctggatgctggcggtggagaagggcagaccgcaatcaaaatggccgagcgtgggcatcaggtcattttatgcgatctttctgcgcagatgatcgaccgcgcaaaacaggcggcagaagcaaaaggtgtgagcgacaacatgcaatttatacattgcgccgctcaggatgttgctagccatttggaaacgcccgttgatctgatattgttccatgcggtgctcgagtgggtggctgatccccgcagcgtattgcagaccctctggagtgtgttgcgtccaggcggcgtgttgagcttaatgttctacaatgcgcatggtttgttgatgcataacatggtcgccgggaattttgattacgtgcaggcgggaatgccgaaaaagaaaaaacggacgcttagcccagattatccacgcgacccggcgcaggtttatctgtggctggaagaagctggttggcaaattatgggtaagacaggcgttcgcgtgtttcatgattatctgcgcgagaaacaccagcagcgcgactgctatgaagcattacttgaattagaaacgcgttattgccgtcaggaaccgtatattaccctggggcgttatattcatgtcaccgcgcgcaaaccgcagagcaaggataaagtatgagtgaattttcccagacagtccccgaactggttgcctgggccagaaaaaatgacttctccatcagcctgccggtagaccgactctcttttctgctggcggttgccacgctgaacggcgagcgtctggatggtgagatgagtgaaggcgagctggtggatgcattccgccatgtgagtgatgcgtttgagcaaaccagcgaaaccatcggcgtgcgcgccaataacgcgatcaacgacatggtgcgtcaacgtctgctgaaccgctttaccagcgagcaggcggaagggaacgcaatttaccgtctgacgccgctcggcatcggcattactgactactacatccgtcagcgcgagttttctacgctgcgtctttctatgcagttgagcattgtggcgggtgagctcaaacgcgcagcagatgccgccgaagagggcggtgatgaatttcactggcaccgtaatgtctatgcgccactgaaatatagcgtagcagaaattttcgacagtatcgacctgacgcaacgtctgatggacgaacagcagcagcaggtgaaggacgatatcgcccagttgctgaacaaagactggcgggcggcgatttccagctgtgaattgttgcttagcgaaacttccggaacgctgcgtgaattgcaggatacgctggaagcggcaggcgacaaattgcaggctaatctgttgcgcattcaggatgcgacgatgacccatgacgatctgcatttcgtcgatcgtctggtgttcgatctgcagagcaaactcgatcgtattatcagttggggccagcaatccatcgacttgtggattggctacgaccgccacgtacacaaatttattcgtaccgcgatcgatatggataaaaaccgcgtctttgctcagcggttacgtcagagcgtacaaacctattttgatgagccgtgggcgctaacttatgccaatgccgatcgtctgctggatatgcgtgacgaagagatggcactgcgcgatgaagaagtgactggggaacttcctgaggatctggaatacgaagagtttaacgagatccgcgaacagctggcggcgatcatcgaagaacaacttgccgtgtacaaaaccagacaagtgccgctggatcttggtctggtggtacgcgaatatctgagtcagtatccgcgtgcacgtcactttgacgttgcgcgtattgttattgatcaggcggtacgtcttggcgtagcgcaagcagatttcaccggactgccagcgaaatggcagccgattaatgattacggagccaaggtacaggcgcatgtcatcgacaaatattgaacaagtgatgccggttaagctggcgcaggcgctggcgaatccgttatttccggcgctggacagcgccttacgtagtggacgccatattggcctcgacgaactggataatcatgcattcctgatggattttcaggaatatctggaagagttttacgcgcgttataacgttgagcttattcgcgcaccagaagggttcttctatttacgcccacgttccaccacgctgatccctcgttccgtcttgagcgaactggatatgatggtcgggaaaatcctctgttatctctatctcagcccggaacggctggcgaatgaggggattttcacccagcaggaactgtacgacgaactgctcaccctggccgatgaagcaaaactgctgaaactggtgaacaaccgtagtaccggtagtgacgttgaccgtcagaagttgcaggagaaagtacgttctagcctcaaccgtctgcgtcgtttaggcatggtgtggtttatgggccacgacagcagcaagtttcgcattaccgaaagcgtgttccgcttcggagccgatgtgcgtgctggcgacgatccccgtgaagcacagcgtcgcctgattcgtgatggcgaagcaatgccgattgaaaatcatctgcaactcaacgatgaaaccgaagagaatcagccagatagcggagaggaagaataatgattgaacgcggtaaatttcgcagtctgacgctgattaactggaacggcttttttgcccgaacttttgaccttgacgagctggtcacgacgctttctggcggtaacggggcgggtaaatccaccaccatggcggcgttcgttacggcgctgatccccgacctgaccctgctgcatttccgtaacactacggaagccggggccaccagcggtagccgcgataaaggtctgcacggtaagctgaaagcgggtgtctgttatagcatgctcgacaccattaacagccgccaccagcgcgtggtggtcggtgtgcgtctgcaacaggttgccggacgcgatcgtaaagtggatatcaagccgtttgccattcagggactgccgatgagcgtgcagccgacacagctggtgaccgaaaccctgaacgaacgccaggcgcgcgtgctgccgcttaacgagctgaaagacaagctcgaggcgatggaaggcgtgcagtttaaacagttcaactccattactgattaccacagcctgatgttcgatctgggcatcatcgcgcgtcgtctgcgctccgcatctgaccgtagcaaattctatcgtctgatcgaagctagcctgtatggcgggatctccagtgccattacccgttctctgcgcgactacctgttgccagaaaacagcggcgtgcgtaaagcgttccaggacatggaagcggcgctgcgtgaaaaccgtatgacgctggaagcgattcgtgtcacccagagcgaccgcgacctgtttaagcatctgatcagcgaagccaccaactacgtggcggcggactacatgcgtcacgccaacgagcgccgtgtccatctcgacaaagccctggagtttcgtcgcgagctacatactagccgtcagcaactggcggctgagcagtacaaacacgtcgatatggcgcgtgagctggcagagcacaacggtgccgaaggcgatctggaagcggattatcaggcggccagtgatcacctgaacctggtgcaaaccgcactgcgtcagcaggagaagatcgaacgctacgaagcggatctcgatgagctgcagatccgtctggaagagcaaaatgaagtggtggcagaagccatcgaacgccagcaagagaatgaggctcgtgcggaagctgccgaactggaagtggacgagctgaaaagccagcttgctgactaccagcaggcgctggacgtccagcaaacgcgcgcgatccagtataaccaggcgattgctgcgcttaatcgtgccaaagaactgtgccatctgccggacttaaccgccgactgcgccgccgaatggctggaaaccttccaggcgaaagagctggaagcgactgaaaaaatgctctctcttgagcagaaaatgagcatggcgcaaaccgcgcacagccagtttgagcaggcttatcagctggtggtggcaatcaacggcccactggcgcgtaacgaggcgtgggatgtcgctcgcgaactattgcgcgaaggggtcgatcagcgtcacctggcagagcaggttcagccgctgcggatgcgattaagcgaactggaacagcgtctacgcgagcagcaagaagctgagcgtctgctggcagatttctgcaaacgtcagggcaagaattttgatatcgacgaactggaagccctgcatcaggaactggaagcacgcattgcctctctttccgatagcgtgtctaacgcccgtgaagagcgcatggcactgcgccaggagcaggaacagctgcagtctcgcattcagagtttgatgcagcgtgcgccggtttggctggcagcgcaaaacagtctcaaccagttgagcgaacagtgcggcgaagagtttacctccagccaggacgtcaccgaatatctgcaacagttgctggagcgtgagcgagaggcgattgttgaacgcgatgaagtgggcgcgcgcaaaaacgccgtcgatgaagagatcgaacgtttaagccagcctggcggctctgaagatcagcgtctgaacgcgctggcggagcgttttggtggtgtgctgctgagtgaaatttatgacgacgttagcctggaagatgcgccgtacttcagtgcgctgtatggcccgagtcgccacgccatcgtggtgccagatctgagtcaggtaactgaacacctggaaggcttgaccgattgcccggaagatctctatctgatcgaaggagatccgcagagtttcgatgacagcgtgttcagcgttgatgagctggaaaaagcggtagtggtgaaaatcgccgatcgtcagtggcgttatagtcgtttcccggaagtgccgctgtttggtcgtgctgcgcgtgaaagccgtattgaaagcctccatgccgagcgtgaagtgctttccgaacgcttcgccacgctctcctttgatgtacagaaaactcagcgtctgcatcaggcgttcagccgctttatcggcagtcatctggcggttgcgtttgagtctgacccggaagcagaaatccgtcaactgaacagccgtcgcgtcgaactggagcgggcgttaagtaatcatgaaaatgataaccagcagcagcgtattcagtttgagcaggcgaaagagggcgttacggcgctgaaccgcattctgccgcgtctcaacctgttggctgatgacagcctggcggatcgcgtcgatgaaatccgcgaacgtctggatgaagcccaggaagccgcgcgttttgttcagcagtttggcaatcaactggcgaaactggaaccgattgttagcgtattgcagagcgacccggaacagttcgaacagttaaaagaagattacgcgtactctcagcagatgcagcgcgatgcccgtcagcaggcgtttgccctgacggaagtggtgcagcgtcgtgcgcactttagctattctgacagcgcagaaatgcttagcggtaacagcgatctcaacgaaaaactgcgtgaacgtctggaacaggcggaagcggagcgtacccgcgctcgcgaagcgttgcgcggtcacgcagcgcagttgagtcagtacaaccaggtgctggctagcctgaaaagttcttacgacaccaaaaaagagctactcaacgatctgcaacgtgaattgcaggatatcggcgtgcgtgctgatagcggggcagaagagcgggcgcgtattcgccgtgacgagctgcatgcgcaactgagcaataaccgtagtcgccgcaatcaactggaaaaagcgcttaccttctgcgaagcggagatggacaacctgacccgcaaactgcgcaagctggagcgggattactttgagatgcgcgagcaggtagtgaccgccaaagcgggctggtgtgcggtgatgcgcatggtgaaagataacggcgttgagcgccgcttacaccgtcgtgagctggcttatctctccgctgatgatttgcgttccatgagcgataaggcgttaggtgcgctgcgtctggcggtggcggataacgaacatctgcgcgacgtgctgcgcatgagcgaagatccgaaacgtccggagcgtaaaattcagttcttcgtggcggtttatcagcatctgcgtgaacgtattcgtcaggatattattcgtaccgatgatccggtggaagctatcgaacagatggagattgaacttagccgtctgaccgaagaattaacctcccgtgaacagaaactggcgatcagttcccgcagcgtggcgaacatcattcgcaaaaccattcagcgcgagcagaaccgtatccgtatgctcaaccaggggttgcagaacgtaagctttggtcaggtgaacagcgtgcgtctcaacgtgaacgtgcgtgaaacgcacgccatgctactggatgtgctctctgaacagcacgagcagcatcaggatctgtttaacagcaaccgtttgaccttcagcgaagcgctggcgaaactgtatcaacgtcttaacccgcagattgatatggggcagcgcacgccgcagaccatcggtgaagaactgctggattaccgcaactatctggaaatggaagttgaggttaaccgtggttccgatggctggctgcgcgcagagtctggtgcattgagcaccggtgaggcgattggtaccggtatgagcattctggtgatggtggtacaaagctgggaagatgaatctcgccgcctgcgcggtaaagatatctctccttgccgcctgctgttcctcgatgaagcagcgcgactggatgctcgttctatcgccacgctgtttgaattgtgtgagcgtttgcaaatgcaactcatcatcgcagcgccggaaaatatcagcccggagaaaggcaccacctataaactggtgcgtaaagtcttccagaataccgaacacgttcatgtcgtcggcctgcgaggatttgcgccgcaactccctgaaacgcttccaggaactgacgaagcgccttctcaggcgagttaaaattaaggcggcagcaatgccgccttttctttttccgaaaactccgtttctgcactaaaaaagtggcacattacggcgcgcttttctttaaacttctttacattaggttatgtaaaaacgtatcggcgtttatatactgaagataagcctgatgagtaacaggcttgctcgtcatactttcgtgagtattggcgttgtacaggcaagtcgtaaaataacagcctggctattcagagtatgataaaaacagggggcaagggatgttgcttaatatgatgtgtggtcgtcagctgagcgcaatcagtttgtgcctggccgtaacattcgctccactgttcaatgcgcaggccgatgagcctgaagtaatccctggcgacagcccggtggctgtcagtgaacagggcgaggcactgccgcaggcgcaagccacggcaataatggcggggatccagccattgcctgaaggtgcggcagaaaaagcccgcacgcaaatcgaatctcaattacccgcaggttacaagccggtttatcttaaccagcttcaactgttgtatgccgcacgcgatatgcaacccatgtgggaaaaccgtgatgctgttaaagccttccagcaacagctggcagaggtggcgattgccggtttccagccgcagtttaataaatgggtagagttactgaccgatcctggtgttaacgggatggcacgcgacgtggtgctctctgatgcgatgatgggctatctccatttcattgcaaatattccggtcaaaggcactcgctggctatatagcagtaaaccttatgcacttgcaacgccgccgctcagcgtgattaaccaatggcagctggcgctggataaaggtcaattgcctacgtttgttgcaggactggcaccgcagcatccgcaatatgcggcgatgcatgaaagcttactggccttactctgtgacaccaaaccgtggccccaactgaccggcaaagcaacgttgcgcccagggcagtggagtaacgacgtaccggcgttgcgcgaaatattgcaacgcacaggcatgttggacggggggccgaaaattactctacctggcgatgacacgccaactgacgcggtagtcagcccatccgctgttactgttgaaacagcagaaactaagccgatggataagcaaacgacgtctcgtagtaaacctgcgcctgccgttcgcgccgcctacgataatgaactggtggaagccgttaaacgttttcaggcatggcaaggattgggggcagatggtgctattggcccggcaacacgtgactggttaaacgtaacgcccgcccagcgtgctggtgtgttggctctcaacatccagcgattgcgcttgctgccaacagagctttctaccgggatcatggttaacattccggcctatagcctggtctactatcagaacggcaatcaggtgctggatagccgagtcattgtcggtcgccccgatcgcaaaacgccgatgatgagcagtgcccttaacaacgtagtggtaaacccgccgtggaacgtacctccaactctggcacgcaaagatattctgccaaaagtgcgcaacgatccgggatatctcgaaagccatggctatacggtgatgcgcggctggaacagcagagaagcgattgacccatggcaggttgactggtctacaatcacggccagcaatttaccgttccgcttccagcaggctccaggcccacggaacagcctggggcgctataaattcaatatgccgagtagtgaggccatttatttgcatgacacgccgaaccacaatctgttcaagcgtgatacacgcgcattgagcagtggctgtgtacgagtgaataaagcttccgatctggcgaatatgctgttgcaggatgcaggctggaatgacaaacgtatttctgatgcgctgaagcagggtgatacacgttacgtcaatattcggcagagcattccggtgaatctctactacctgacggcctttgttggtgcagatggtcgtacccagtatcgtacagatatttacaattatgatctgcctgcgcgatccagcagccaaatcgtaagcaaagcggaacaattaatcaggtaaatgaagtagttcggggaaatcagttgtcgtaataattagcatgattgggggcgattctctgcagcccccgtcactgctggggttgagtcatcttgacgtctgctttacgggcggttaaggtgcctcttgtgcgccagaagtgcatataaacgataacattgacctgtagacttgattatcatggacaaattcgacgctaatcgccgcaaattgctggcgcttggtggcgttgcactcggtgccgccatcctgccgacccctgcgtttgcaacactctctaccccacgcccgcgcattttgacactcaataatcttcataccggagagagtatcaaagcggagtttttcgatggcagaggctatattcaggaagaattggcaaaacttaaccattttttccgcgattaccgcgcgaacaaaataaagtccatcgacccaggattattcgaccagttgtatcgcctgcaagggttgttaggcacgcgcaaaccggtgcaactcatttccggttatcgttctattgataccaacaatgaactacgcgcccgcagccgtggagtagcgaagaaaagctatcacactaaaggccaggcgatggatttccatattgaaggtatcgcgttaagcaatattcgcaaagccgcgttatctatgcgcgcaggtggtgtaggatattatccacgtagtaactttgtgcatattgataccgggccagcacggcactggtaataattgcttaacgaaacaggggcagtatgaactatcgtattattccggtcaccgcattctcccagaactgtagtttaatctggtgtgaacaaacccgtctggccgcactggtcgatcctggcggcgatgcggaaaaaatcaaacaggaagttgatgacagcggcctgacactgatgcagatcctgctgacgcatggtcatctggaccacgttggcgcagcggcggaactggcgcaacattacggcgtgccggttttcggcccggaaaaagaagatgagttctggctgcaaggcttgcctgcgcaaagtcgtatgtttggtctggaagagtgccagccgctgacgccagatcgttggctgaacgaaggcgataccatcagcatagggaatgtgactttacaggtgttacattgccctgggcatacgccgggtcatgtcgtgttttttgatgatcgggcaaagctgctgatttctggcgatgttattttcaaaggcggagtagggcgcagtgacttcccgcgtggcgatcataatcaactgatttctagtatcaaagataaattgctgccactgggggatgacgtgatatttattccgggtcacggaccattatccacacttggttatgaacgcctgcataatcccttcctgcaagacgaaatgcccgtctggtaaggcacataaaaaagcccgcttttaatgctggcctggatttctggcaaagtgcgctttgtttatgccggatgcggcacgagcgccttatccggcctacaaaatcgtgcaaattcaaaatattgcaggggacgcgtaggcctgataagcgtagcgcatcaggcaatgttgcgtttgtcatcagtctcagcccgcttttcagcgggcttcattgtttttaatgcttacagcactgccacaatcgcttcgcacagcggagccatgttatctggtgtcatcccggccacatttacgcgaccagaagcaaccgcatatacgccaaactcttcgcgcagacgcagcacttgttcttttgtcaggccactgaaggagaacatgccgttctgtttgatgataaagctgaagtcgcggtttgcgcctttttcctgcagcgtattgacgaacaactgacgcatacgctgaatacgctggcgcatatcagtcagctcttgttcccaaatcgcacgtaacgcatcgttgctcaggatggtggcaacaacagaagcgccgtgtgctggtgggttagagtagttagcgcgaatcgccgctttcatttggctgaatgcgcgatcaacggtttcactgtcggcagcaaccagagtacaagcgccaacacgctcgttgtacaggccaaagtttttagagtaggaactggcaacaatcagctctttatgcatagccgcgaaagcgcgcagtccttcagcatcttcttccagaccacgggcaaaaccctggtaagcgaagtcaaacagcggtaaccagcctttctcaacggagagttgtgccagtgtttgccattgttccagcgtagggtcgataccggttgggttatggcagcagccatggaacagcactacgtcgccagcctgagcttcattcaggctgttaatcagtgcatcgaagtcaagagtgtgattttccgcatcataataagcgtattcacgaacttccagacctgcagagttaaagacgctcttatggttcggccagcttgggttgctcacccacacacgcttaacgctggtattttttgccaggaaatcggcagccacgcgtagtgcgccagtgccccccggagtctgtgccgtgcgagcacgtttgtcattgatcagggcgctacctttaccaaacagcagttcctgagtgcagcgaccaaattcagggatgccgtcaatgccgaggtaatttttggtggtttcattttcgagcagatactgttcagcctttttcacgctggtcagtaccggggttttgcccgtctcatctttatagacaccaatcccgaggttaattttgccgggacgttcatcggcacgaaacagatcggccaggcccagaatcgggtcggcaggagcggcggtaatgttctcaaacatgacgaggttccattatggttacagaagggaagtccgctatcagggtaacgggagatttacaaaattccaactattactgatgaaaacgcaggctgtttttgcaagacgtgagattgctctggaaggtataaaaaaaacaggaccaaagtcctgttttttcggcatttaacaaagaggtgtgctattagaactggtaaacgatacccacagcaacggtgtcgtcactacctacgcccagtttgttgtcagaatcgatctggttgatgatgtagtcaacataggtggacatgtttttgttgaagtagtaggttgcgcccacttcaaagtagttcaccagatcaacatcaccgataccttctacgtctttcgctttagatttggtgtaagcgatggacggacgcagaccgaaatcgaactggtattgcgcaactaacagaacgtcttgcgttttgttggcgaagccgctggtgtttgtaaatttattagtgatcggcgtagcgttacgggtttcaccgtagttcgctgccaggtagatgttgttcgcgtcgtacttcagaccagtagcccactgttcagcttttttaccgttgccaagaggttgagcttcttgcaggttggtacggtcagctgcaccataagcaccaacgataccaaagccttcgtattcgtagctgatagaaccgccaacaccgtcgccgttagaacggcgtgcagtgtcacgctcgtttttacccaggtactgaacagcgaagttcaggccatcaaccagaccaaagaagttggagttacgataggtagcaacgccgccaacacgaccaacgaagaagtcatcgctgtatgcagtatcaccaccaaattctggcagcatatcggtgtaacccagtgcatcataaaccacaccgtagttacggccgtaatcgaaagaaccaacgtcagcgtatttaagacccgcgaatgccagacgcgttttgttaccagtttgagcgtcagcgccttcagagttgttaccctggaagttatattcccactgaccataaccggtcagatcggaattgatttgagtttcccctttaaaaccaagacgggcataggtcatgtcgccattgccaccgtaactgttttcaccgttacccttggaaaaataatgcagaccaacagctttaccgtacagatctactttgttgccatctttgttatagatttctgcagcgtttgcagtacctgctactaacagagcagggacgatcactgccagaatattgcgcttcatcattatttattaccctcatggttttttttatgacacctgccactgccgtcaataagttctgtcaataaaaatttacggaactattgatgagagtttggtgtctttatgtgtctgcaggcatctttccattcaaactaacgtttcgctaccgtgaaagtgctacaaagataaagatttggtttcaaaaagaaaaaatatgtaaccaaaagtaaaatttaaggaactttgtgaacaccgtcatatttccatagagacgtgatgatatttacagcaattttaatctatttatatgatttccttatatttaaattaactaaacggaaattttgtttctgatggaaactttatcgacctggcacaaaatcttctttcagacatccagaatgccaaaaaatagtatgaaaattgtgctattagctaagaaaaaactaatccgcaataagaatgcggattagtttttgcgcgtaaatgttgcaatgtaatattccgtaacaggatgatcgttatggcggggttgcaaatagattgcttgacttaacaaacagataacttgacagaaaagataaaaaaagagccagcgggcgctggctcttgaagacgctaaattagaagctggcgttacgcggagtacgtgggaacggaatcacatcacgtacgttttgcacgccagttacgtaagcaatcagacgttcaaaaccaagaccgaaaccactatgcggaacagtaccgtagcgacgcagatcgcgataccaccagtaatcttctttattcaggcccatttccagcatacgctcgtccagcacgtccagacgttcttcacgctgggagccaccaatgatctcaccgatgcccggagccagaacgtccatagccgcaacggttttaccgtcttcgttaaggcgcatatagaacgctttaatatctttcggatagtttttaaccactaccggtgctttaaagtgttcttccgccagataacgctcatgctcagaagagagatcgactccccagtaaaccgggttttcaaacttcctgccgcagttttcgagaatggtcactgcgtcggtataatccacctgcgcaaaatcggcttcaatgaagcgttccagacgactaacggcatctttatctacgcgttcagcgaagaatttcatgtcgtcagcgcgttcttcgagaaccgctttgaagacatatttcagcatggcttcagccagacccgcaatatcgttcaggttagcaaacgccacttccggctccagcatccagaattccgccaggtgacggctggtgttggagttttcagcacggaaagtcgggccgaaggtataaattttggacaatgcgcaagcgtaggtttcgccgttcaactggccagatacggtcaggaaagactctttaccaaagaagtctttgtcgaaatccactttgccctgatcgttacgcggcaggttttccagatccagcgtagaaacgcggaacatttcgcctgcaccttcggtatcagatgcggtaatcagactcgtactaacccagaagaatccctgctcgttaaagaagcgatgcagcgcctgcgccagcgtatggcgaacgcgcgcgacggcaccaatcaggtttgtgcgcggacgcaggtgagcgacttcacgcagatactcaatgctgtggcgttttgccgccatcgggtaagtgtctggatcttcaacccaaccagcaacttcaaccttgctggcctgaatttcaaattgttgcccctggcccgggctcgccacgactttacccgtcacaatgacgctgcagccggtggtcagacgcaggacgtcttcattgtaattgggcagagaattattgatgacagcctgtacaggatcaaagcaggaaccgtcataaacggcgaggaaggagatgccagctttactatctcggcgggtacgtacccatccgcgcacggtgacttcgctgtcaacggctacacggccctggagtacgtcggctacaggcacaacgctcataatattctctctgttaatagtcggaaaaaataaacacttgtccacccgtaaatggggggatacctatgttacctggcatctgcaatcagacaagcagaattcgcaaatgcagcgaaagatttcggaattaaaggtaaaaaaagggagccgattagctccctgatgatattaactggcttttttaatatgcggaaggtcgaacgctttgcgcagcgcccgaacaaacgctttatcatggcagatagttttgccagggctgtcagaaagtttcgccaccggtttaccgttacactctaccaacttaatgacaatattcaggggttttacctgggggatatcgcaggtcaggcgagtcccaataccaaaacttaattgcacgcgggaagagaagtggcggtatagctcaaccgctttgcgtaaatccagattgtcagagaaaaccagcgttttactctgtggatcaattcccagcttttcataatgtgcaatggctttttcaccccattcaaccgggtcgccagagtcatgacgcaggccctgataccgactagcgaactcgacaccgaaatcacgcaggaaagcatccatagtgatgcagtcggttaatgcaatgccaagttggtcgggatactcttccagccaggcagcaagtgcagctcgctggctgttggctagatccgggctgatttgctgatgtgcctggaaccattcgtgtgcctgtgttcccatcggcgtgagggaaagccgacgcgccagatcgtagttgctggtgcccacaaaccaggattcctgttgcagacgcttaacgatggtttcttgtacttcgcgagaaaaacggcgacgggtgccaaaatccatcagatggaagcggctcatatcaagaccggcggttaacgcgctgaagtcgactaatttgctttccagcgtgtcgagggcttgcgcaacgtcggcctgcggactgcgatagcgatgtaccatttcactgataaccgccagcaaaggaacttcccagaggatgacttcacgccacgggccgcttaaacgaatatccagcttgccattatcgttggacacggtgacttgttccgggttaaagcggaactcgcgtaaccagttaagatagtcggccttaaagaaaggcagggcagaaagccactgatattcatcatcctgcaggcgcaggtgctgcatcgcctgaacctgttcacgaatagcatcggcataaatacccagcagatcgtcacctcggcaacgaaactccgccgcgacatgcacatcgtaatagtgatgaaacacggcttgctgcatatgcaacttataagcatctgtatccagcaagctgtgcagaacaggagaagcgaattgtgtcataggtgcgcagtagcgtcctcgtacaggagcgtttagtacaataaacatcttcaggaactgctggagtataccttgtttcgcaatttattgaaccccgatcacaccatatgccacctttctggtcgatggcattacgcggtgtatgttataaaaatgtagcaataaaggcgtttgtacctgaaaagatgaagattctgcatagcgcgatttacgcaacaggaatagactgaacaccagactctataaaagatgctaaaggttatttatgactcaacagccacaagccaaataccgtcacgattatcgtgcgccggattaccagattactgatattgacttgacctttgacctcgacgcgcaaaagacggtcgttaccgcggtcagccaggctgtccgtcatggtgcaagtgatgctccccttcgtctcaacggcgaagacctcaaactggtttctgttcatattaatgatgagccgtggaccgcctggaaagaagaagagggcgcactggttatcagtaatttgccggagcgttttacgcttaagatcattaatgaaataagcccggcggcgaataccgcgctggaagggctttatcagagtggcgatgcgctttgcacccagtgtgaagccgaaggtttccgccatattacgtattatctcgaccgcccggacgtgctggcgcgttttaccaccaaaattattgccgataaaatcaaatatcccttcctgctttccaatggtaaccgcgttgcgcaaggcgaactggaaaacggacgccattgggtacagtggcaggacccgttcccgaaaccgtgctacctgtttgcgctggtggcaggcgactttgatgtactgcgcgatacctttaccacgcgttctggtcgcgaagtagcactggagctgtacgtcgatcgcggcaaccttgatcgcgcgccgtgggcgatgaccagcctgaaaaactccatgaaatgggatgaagaacgctttggcctggagtatgacctcgacatctatatgatcgtcgcggtggatttcttcaatatgggcgcaatggagaataaggggctgaatatctttaactccaaatatgtgctggcccgcaccgacaccgccaccgacaaagattacctcgatattgaacgcgttatcggccatgaatatttccataactggaccggtaaccgagtgacctgtcgcgactggttccagctcagcctgaaagaaggtttaaccgtcttccgcgatcaggagttcagctctgaccttggttcccgcgcagttaaccgcatcaataatgtacgcaccatgcgcggattgcagtttgcagaagacgccagcccgatggcgcacccgatccgcccggatatggtcattgagatgaacaacttctacaccctgaccgtttacgagaagggcgcggaagtgattcgcatgatccacaccctgcttggcgaagaaaacttccagaaagggatgcagctttatttcgagcgtcatgatggtagtgcagcgacctgtgacgactttgtgcaggcgatggaagatgcgagcaatgtcgatctctcccatttccgccgttggtacagccagtccggtacaccgattgtgaccgtcaaagacgactacaatccggaaaccgagcagtacaccctgaccatcagccagcgcacgccagccacgccggatcaggcagaaaaacagccgctgcatattccgtttgccatcgaactgtatgataacgaaggcaaagtgatcccgttgcagaaaggcggtcatccggtgaattccgtgctgaacgtcactcaggcggaacagacctttgtctttgataatgtctacttccagccggtgcctgcgctgctgtgcgaattctctgcgccagtgaaactggaatataagtggagcgatcagcaactgaccttcctgatgcgtcatgcgcgtaatgatttctcccgctgggatgcggcgcaaagtttgctggcaacctacatcaagctgaacgtcgcgcgtcatcagcaaggtcagccgctgtctctgccggtgcatgtggctgatgctttccgcgcggtactgcttgatgagaagattgatccagcgctggcggcagaaatcctgacgctgccttctgtcaatgaaatggctgaattgttcgatatcatcgacccgattgctattgccgaagtacgcgaagcactcactcgtactctggcgactgaactggcggatgagctactggctatttacaacgcgaattaccagagcgagtaccgtgttgagcatgaagatattgcaaaacgcactctgcgtaatgcctgcctgcgtttcctcgcttttggtgaaacgcatctggctgatgtgctggtgagcaagcagttccacgaagcaaacaatatgactgatgcgctggcggcgctttctgcggcggttgccgcacagctgccttgccgtgacgcgctgatgcaggagtacgacgacaagtggcatcagaacggtctggtgatggataaatggtttatcctgcaagccaccagcccggcggcgaatgtgctggagacggtgcgcggcctgttgcagcatcgcagttttaccatgagcaacccgaaccgtattcgtagcttgattggcgcgtttgcgggcagcaatccggcagcgttccatgccgaagatggcagcggttacctgttcctggtggaaatgcttaccgacctcaacagccgtaacccgcaggtggctagtcgtctgattgaaccgctgattcgcctgaaacgttacgatgccaaacgtcaggagaaaatgcgcgcggcgctggaacagttgaaagggctggaaaatctctctggcgatctgtacgagaagataactaaagcactggcttgataaataaccgaatggcggcaatagcgccgccattcggggaatttacccctgttttctcaggcgagtttcagattcaccacgttgcatcacccgttgcaacacctccgcttccagctccgctaatcgcacgctccctaatcgacgcggacgggggatatccactgtcaaatccagaccaatttttccctcttcaattaacagcacccggtcagccatcgctaccgcttcgctcacatcatgcgtcaccaacagtacggtaaagccgtgctcctgccaaagactcacaatcaaatcctgcatctcgagtcgcgttaaggcgtccagcgccccgagcggttcatcaagcaacaataatcccggtcgatgaatcaacgctcttgccagcgccactcgctgtttctgcccgccagaaagtgcggcaggccattcccctgcgcgattctccagtcctaccgcagccaacgctcgacgtgcggcatcgcgccactggcctttaaggcctaacccaacgttatcaatcacgcttttccacggtagcagacgcgcatcctgaaacatcattcgcgtgtcttcctgaatttcagccagcggtgtggtgcccgctaacacatcgcctgcggttggcgtttccagacctgccagcaggcgcagcagggtacttttgccaccaccgctgcggcccaccaccgccacaaactgacctgccggaatatgtaaatccagttggttcaggacgatattttccgcgtaatgtttgcttactgcattgagcaacaatggcgtgccctggttcagacgagcagtattcataccgtggcctccttcaaatgataagccgggttccagcgcaaccagaggcgctctaacagctgcgcgctgacgtcagccagtttgccgagcagggcgtaaagaataatagcgactaccaccacgtccgtttgcaaaaacccccgcgcattcatcgccagataaccaatgccactattggcagaaatggtttcggcaacaatcagcgtcagccacatcaggcccaacgcaaaacgcacgccgaccataatactgggcagggcaccaggcaggatcacatggataaacagcggtatgccggataatccatagctacgcgccatctccaccaacccgcgatcgatattacggatgccatgccaggtgttgatataaatggggaatagcgtaccgagcgccaccagaaagatttttgcggattcatcaatgccaaaccacaaaatcaccagcgggatcagcgccagatgcggcacgttgcgcaacatctgaatactggtatccagcagccgttctccccagcgagatagcccgctaatcagtcccaaaatcaaccccaggcttccgccaatactaaagccaatcagcgcccgccaggagctgatcgccagatgctgccacagttcgccgctggcggagagcgtccagaacgccgtcaccactccttccggactaggcaaaatacgcgtgctcagccagccaacgctggaggccagttgccacaccgccacgatgcccaccggtaaaaaccagggggcaacgcgcaataaccacttcttcactggcgttgccattatttcttccttagctttgcgcgactttacgggggataaaatcattcgccaccgcttcgccttgcggattcagcggctgcggctggggaatttccgggatggcgacatccagaagcgggaacagcaactcgccaacccgatacgcttcttccagatgcggatagccgctaagcacaaaactgtcgatgccaagcgcggcatattcgttgattcgcgcagcgaccgtaggaccatcgcccaccagcgccgtcccggcaccgccgcgcactaagccaacgcccgcccataaattggggctgatctccagattgtcgcgcttgccgttatgtaacgccgccattcgctgttgccctacggaatccgtccgggcgaatgcggcctgtgctttggcgatagtttcatcatcaagatggctgattaaccgctcggcggcctgccacgcttcgtcgttagtttcacgaacaatcacatgcagacgaataccgaaacgaattttgcgtccatgcgcggcagctttcgcccgcacttgttcgattttctctttaaccagttccggcggttcgccccaggtgaggtagagatcaacctgttctgccgccagctcctgggcgacatcactgcttccgccaaagtaaagtggcggatacggctgttgaatcgccgggaagagcagttttgctccgcgcacatgaatatgtttaccgttgaaatcgacggtttctctctgcaataaacgccgccagacctgggtaaattccgcgctggcttcgtagcgctcgctatgatcaaggaacactccgtcgcctgccagctcttgtggatcgctgcctgtgaccaggttaaacaacgcacgtccattactgagacggtcaagcgtggcggcctggcgggcggcaacggtaggactggttacgctgggacgcagggcgacaagaaacttcagccgctgcgtcaccgggatcatgcttgcggcaaccagccacgcatcttcgcaggagcgccccgttggaattagcacaccggtatagccaagacgatccgccgcttgcgcaatttgttgcagataaccgtgatcaaccgggcgactaccttcttccgttcccagataatgcccgtcaccgtgggtcggtaaaaaccagaacatattcagactcataattgttttccttccagttgagtgggctgccagatgcgctggcgaatatcgacttttttcggcaccagacgattttcataaaacagatctgccgtttgctgctgtaaggcggcaacctcggcgttaaccggtttgatggtggtaggagggcgatgatctaagtaagaggcaatcaccggtgccggtaagcccatcgtttttgccagtaaagcgatgctttgctcgcgctggctgcgggttaacgcatcggcctcactaaaggttgccagtacgccctgaataaaagcgccgtttttttctgcatagggacgagctgccagataaaagcttccagtttgattgagatcggtgccgtctttcagcacccgcacgccgccctgtaataatgcagcagagtagtagggatcccagatagcccaggcgtcaacgttaccttgctggaacgcggcgcgggcatcagcgggcgtcaggtaagtgggttggatatcggtaaacttaagtccggcctgacgcagtgcacgcagtaaaaggttgtgactactggaacctttctgaaaggcaactttgtgacctttaagatcggctacggttttgatcgggctgttttctgccaccagaatcacttcggctttgggcttcggtggctcgacgcccacgtacaccaaatcagccccggcagcctgggcaaagattggcggaatatccccggtactgccgagatcaatactgccaacgtttaacgcttccaacatttgcggacccgcggggaactccacccaggagattttactttccggatagcgtttttccagtaactggtggctttttgccagcaccataccaatactgcctttctgatagcctatacgtaacgcttcagggctggattctgcagcaaccgcaaaagtagagacgctaagcaatcccgccagcgccagtttaatgatgttacgcatgggcattacctcgcagagacagaaggtcaggaacctgaacatcgcggcggtgcaatgcctgccagaaagtttctagcgcggtatcaagacgggtttgcagatttggcgtgaactggggtctgtgatggtaatcaattacttgactgtcatcggcaaacacgccgtgcaggatctcctgagctttcagtgcgcttaaaactggtttaagggcataatcgaccgccagcagatgggccacggtaccgcccgtcgccagcggtagcaccactttgccttgcaaagcgcgttctggcagcaggtcgagcagggttttcaacgcaccggaataggcggctttatacacaggcgtggcgacaatcagcccatcggcctgttgcagctgttcggtgaaggtcttgagtgccggactatcgaaacgagcataaagtagatcttccggggcgaagttttgcagattccagtgataaacctctacatccaggccatttagtttttcccgcgcatattccagcaaggagctggagcgagaaggaaagcgaggactacccgccagggtgatgacacgcatactctctccttataaccaattgttctttttttgttaacattgataacaattcggtcagtctgtcggagagacaagaaaattccaaatataaattttgtgtatctttttctgaaaataaactaaagaaagggctttatatatcacgcatatttatttattggatagtcattagatgttgaatcaatgaattactcgttcagttaatatttaaatattcatgaaatctataaattaaagatttgtcacttattggatttagtatgcttgatttaaatggcggacaattattgttattattaagtctaatgtcatttaaaggcattatcatatttacgaagagatcaggatgataacgatgaaaaaaagtgtattgacggcgtttataactgtggtatgtgcaacgtccagcgttatggctgctgatgataatgctatcacggatggcagtgtaacatttaatggtaaagttattgctccagcttgtaccctggtagctgcgacgaaagattccgtggtgactttgccagatgttagtgccacgaagttgcaaaccaatggtcaggtttctggcgtgcaaattgatgtgccaattgaattaaaagattgtgatactaccgtaacaaaaaatgcaacgttcacctttaatggcactgcggatactactcagattacagcgtttgctaaccaggccagttctgatgctgctacaaacgtggccctgcaaatgtatatgaatgatggtacaacggccatcacgccagacacagaaaccgggaacattttgttgcaggatggagatcagacgttgacttttaaagttgattatatcgctacggggaaagcgactagtggtaatgtgaatgcggtaacaaatttccatattaactattattaatagaactcattaattgttttattaattagtacccctccagtgttctggaggggatattcatattttttaagagtgactatttatgaaaacttgcataacaaagggaattgtgaccgtaagtttaacggcaatattactcagctgcagttccgcatgggcggcaggtaaaggcgggattggacttgcagcaacacgtcttgtttatagtgaaggtgaagagcaaattagtctgggtgtacgtaacaccagtccggatgttccttatcttattcagagttgggtgatgaccccagataataaaaaaagtgcagactttattattacaccaccgctatttgtgctgaatccggcaaatgagaatctgttacgcattatgtacattggagcgccgttggcgaaagacagagaaacccttttcttcactagcgtacgggcagtccctagtacaacgaagcggaaagagggaaataccctgaagattgccacacaaagcgtcatcaaacttttctggcgaccaaaaggtttagcgtatcccttaggcgaggctccggcgaaactgcgttgcactagcagtgctgacatggttacggtcagtaacccaacaccttatttcattaccctgacagacctgaaaataggtggaaaagtagttaaaaatcaaatgatttccccctttgataaataccaattttctctgccaaagggggccaaaaatagcagcgtaacgtatcgaaccatcaatgactacggggcggaaacgccgcaactcaactgtaaaagctaagccgtcttcagttaagagagcgagatgtatagaactcatcgacaacacagcctgttaagctctggtggagtgccaagctttattggtgggctggtggtgtttgtgagcgcagcgttcaatgcacaagctgaaacctggttcgatcctgcttttttcaaagatgatcccagtatggtggccgatttgtctcgtttcgaaaaaggacaaaaaataacgccaggggtttatcgtgtcgatattgttctgaatcagacaattgtagatacgcgcaacgtcaattttgttgagataacgccagagaaggggattgccgcctgtttgacgactgaaagcctggatgcaatgggtgttaatactgatgcgtttccggcttttaaacaactggacaaacaagcgtgtgtgccattggcggagattattccggatgccagcgtaacgtttaatgtgaataaactccgtctggaaattagtgtaccgcaaatcgccatcaaaagtaatgcccgtggttatgtcccccctgaacgttgggatgaagggatcaacgcgctattactgggatatagctttagcggggctaacagtattcatagcagcgcagacagtgattctggcgacagctattttctgaatttaaacagtggcgttaatttaggcccatggagattgcgcaacaatagtacatggagtcgtagtagtggccaaaccgcagaatggaagaatctcagcagctatttgcaacgggcggttattcctctgaaaggcgaactgaccgtaggtgatgattatactgcaggcgattttttcgatagtgtcagctttcgtggtgtgcagctggcgagtgatgacaacatgctgccagacagcctgaaagggtttgcgcctgtggtgcgtggtatcgccaaaagcaatgcccagataacgattaagcaaaatggttacaccatttaccaaacttatgtaagccctggtgcttttgaaattagtgatctctattccacgagcagcagcggtgatttgttagttgaaatcaaagaagcggacggcagcgtcaatagctacagcgtaccgttctccagtgtgccattactccagcgtcaggggcgaatcaaatacgcggtgacactggcgaaatacagaaccaatagtaatgaacagcaggagagcaaatttgcccaggccacgttgcagtggggcggaccgtggggaacgacctggtatggtggtggacaatatgctgaatattaccgtgccgccatgtttggtctgggatttaacctcggcgatttcggagcaattagcttcgatgcgacccaggcgaagagtacgctagcagatcaaagcgaacataaaggtcagagttatcgttttctgtatgccaaaacgctcaaccacttgggcactaactttcaattgatgggctatcgctatagcacgagcggtttctacaccctttccgacaccatgtataaacatatggatggctacgaatttaatgacggtgatgatgaagatacgccgatgtggagccgttattacaatttgttttacaccaaacgtggcaaactgcaggtcaatatctcccagcaattaggcgagtacggtagcttttatttaagtggtagccagcaaacttactggcatacggatcaacaggatcggctattacagtttggctacaacacgcaaattaaagatcttagcctggggatttcctggaactacagtaagtcccgtggtcaacctgatgctgatcaggtgtttgctctaaatttttccctgccgctcaatctgttgctccccagaagtaatgatagctataccaggaaaaaaaattacgcctggatgacctctaacaccagtatcgataacgaagggcacactacacaaaacctgggtttaacggagacattactcgatgacggtaacctgagctacagcgtgcaacagggatataacagcgaggggaaaacggctaatggtagcgccagcatggattacaaaggggcgtttgcggatgcccgagtgggctacaactacagcgataacggcagtcaacaacaactgaactacgctcttagtggcagtttagttgcccatagtcagggcattaccctggggcaaagcctgggggaaactaacgttctgattgcagcaccaggcgcagagaatactcgtgtggcgaacagcaccgggctgaaaactgactggcgcggatataccgttgttccttatgccacttcttatcgggaaaatcgaatcgcacttgatgcggcgagcttaaaacgtaacgtggatcttgaaaatgcagtagtcaacgtggttcccaccaaaggggcgttggttctggcggagttcaatgcccatgcgggtgcaagggtattaatgaaaacaagtaagcagggtataccgctgcgttttggcgcgatagcgacgctggacggcgtacaggctaatagcggcataattgatgatgatggcagcctctatatggcgggtttaccggcgaagggaacaataagcgtgcgctggggcgaagctcccgatcaaatttgtcatatcaattacgagcttaccgaacaacaaattaactctgcgattacgcgaatggatgccatatgcagataatctttggagaaaaatgcgtgagtttactacgactattttttgccgccgtcttaatgttatggtgcgctcaaaccgctgcttatagcgggcagtgtcatactactcaggggaatccgtatattggcgtcaattttggcgttaaaaccctggaggaagaagcaaatacggcaggggtagttaaagacaaattttatcagtggaacgaaagcaatgattattatgtttcctgtgattgcgataaagacaatgtcagaagtggccgatgggcattcgccgcggatagtccgttagtctatttaggcgacaactggtacaaaattaatgactatcttgccgccaaagttttattgcaggttaaaggcagttctcctactgcggttcctttcgaaaacgtgggcacagggggggatacccgatggcatatttgcgaccctggcggtcaacgtttaggtgggcagggggcaagcggtaatagcggtagcttttccctgaaaatattgcagccgttcgttggcagcgtcgtcattcctcctatggcgctggcgcgattatatgaatgctacaacatacccgcaggtgattcctgcacgactacaggtacaccggttttagtgtattacctgtctggtacgatcaatagtcttggcagttgttccgtcaatgccggagagacaattgaagttgatttaggtgatgtcttcgctgccaatttccgtgttgtagggcataaacctcttggggccagaacggcagaacttgcaattccagtcaggtgtaacacgggaaacgcgggattagttaatgtcaacctgagtctgacggcaaccacagaccccagctatccccaggcgattaagacgagtcgtcctggcgtgggcgtggtggtgaccgatagccagaacaacattatttcccctgctggtggaacattaccgctctctattcctgatgatgcagacagtatcgcgcgaatgaatgtctatccagtcagcacgacaggtgtaccaccagaaaccgggcgatttgaagccacggcaacggtgagaataaattttgattaacgcgtgaacgtatgaagaaaaaaacgatatttcagtgcgttatcttgttctttagcattcttaacatccatgtcgggatggctgggcctgaacaagttagtatgcatatttatgggaatgtggtcgatcagggctgtgatgtcgccaccaaaagtgcattacaaaatattcatattggtgattttaatatcagtgattttcaggccgcgaataccgtaagcactgctgctgatttgaatatcgatatcaccggttgtgccgctggtattactggcgcggacgtcctttttagcggcgaggctgacacccttgcgccgacactgctcaaactaactgacacaggcggaagcggtggtatggcaacggggattgccgtgcaaattcttgatgcgcaaagtcagcaagaaatcccgctcaatcaggtccagcctcttacgcccttaaaagccggggataacacactcaaatatcaacttcgttataagtccacaaaggcgggagcaacgggcggtaatgcgacggcggttctctattttgatctggtttaccagtgaaggagtgatgttgaaacggataatctggattctgttcttattgggattaacgtggggctgtgagctatttgcccatgatggcacggtcaacattagcggaagctttcgccgtaatacatgcgtgctggcacaggatagcaagcaaatcaatgtgcagttaggcgatgtcagcctgacacgtttttctcatgggaattatggcccggagaaatctttcatcattaatttgcaggattgcggaacagatgtcagcacggttgacgtcacctttagtggaacccccgacggagtgcagagcgaaatgttgtccattgaaagtggtacggatgcagccagcgggctggcaattgcgattctggatgatgcgaagatattgattccgcttaaccaggcgagtaaagactacagcctacatagcggtaaggtgccattaactttttatgcgcaattgcgacctgtcaatagcgatgtgcagagcggtaaagtgaatgccagcgcgacatttgtacttcattatgactaatacgtggaacagattggcgctcttgattttcgccgttttaagcctgctggtggcgggtgaattgcaggcaggagtggtggtcggcggaacgcgatttatctttccggcagacagagaaagcatatctattttactgactaataccagtcaggaatcctggcttattaacagtaaaatcaaccgcccaacgcgttgggccgggggggaagcgagcacagtgccagcaccattactggccgctccgccacttattctcctgaagcccggtacgacaggcacgttgcgcttgctgagaacggaaagcgacatcttgcctgtggatcgcgaaacgctatttgagttaagcattgccagcgtgccatccggcaaagttgaaaatcagagcgtaaaagtggcgatgcgcagcgtatttaaactgttctggcgacccgaaggtttgccgggcgacccgctggaagcttatcaacaattacgctggacacggaatagccagggtgtacaactcactaacccaacgccttattacattaacctgattcaggtgagtgtaaatggtaaagcgttaagtaatgtgggagttgtgccgcctaaaagccagcgtcagacaagctggtgtcaggcaatcgcaccgtgtcatgtcgcctggcgggcgataaatgattacggcgggttgagtgcaaagaaggagcaaaatctgccctgaaacaggttcggaaaacgtttgcgttttttttgccgcaggtcaattcccttttggtccgaactcgcacataatacgcccccggtttgcacaccgggaatccaggagagttcatgtactaccccttcgttcgtaaagcccttttccagctcgatccagagcgcgctcatgagtttacttttcagcaattacgccgtattacaggaacgccgtttgaagcactggtgcggcagaaagtgcctgcgaaacctgttaactgcatgggcctgacgtttaaaaatccgcttggtctggcagccggtcttgataaagacggggagtgcattgacgcgttaggcgcgatgggatttggaagcatcgagatcggtaccgtcacgccacgtccacagccaggtaatgacaagccgcgtctctttcgtctggtagatgccgaaggtttgatcaaccgtatgggctttaataatcttggcgttgataacctcgtagagaacgtaaaaaaggcccattatgacggcgtcctgggtattaacatcggcaaaaataaagatacgccagtggagcagggcaaagatgactatctgatttgtatggaaaaaatctatgcctatgcgggatatatcgccatcaatattagtagcccgaataccccaggattacgcacgctgcaatatggtgaagcgctggatgatctcttaaccgcgattaaaaataagcaaaatgatttgcaagcgatgcaccataaatatgtgccgatcgcagtgaagatcgcgccggatctttctgaagaagaattgatccaggttgccgatagtttagttcgccataatattgatggcgttattgcaaccaataccacactcgatcgttctcttgttcagggaatgaaaaattgcgatcaaaccggtggcttaagtggtcgtccgcttcagttaaaaagcaccgaaattattcgccgcttgagtctggaattaaacggtcgcttaccgatcatcggtgttggcggcatcgacagcgttatcgctgcgcgtgaaaagattgctgcgggtgccagtctggtgcaaatttattctggttttatttttaaaggtccgccgctgattaaagaaatcgttacccatatctaattatttcttcgaattcctctttataagataatcagggctttattttcagccctggttgttttatattcatcgctgttgcttatttagacattttgtacttttattgttgaggttattaagcgaagcgacaatggattgtgttgctgcggttttatagggtaggggagaggcagatgcgaattaaaccagacgataactggcgttggtattacgatgaagagcacgatcgaatgatgctcgatttagccaatggtatgctatttcgcagtcgttttgcgcgcaagatgttgactccagatgccttttctcccgcaggcttttgcgttgacgacgccgcgctctatttctcttttgaagaaaagtgccgcgattttaatttatctaaagaacaaaaagccgaactggtgctgaatgcactggtagcaattcgctatctcaaaccgcaaatgccgaaaagctggcattttgtttcccatggtgaaatgtgggtgcccatgccgggcgatgcggcctgcgtttggttgagcgatactcacgagcaggtcaatttgctggtcgttgaatctggcgaaaatgccgcactatgcctgctggcacaaccctgcgttgttattgcgggtcgcgcgatgcagttgggcgacgccattaaaatcatgaacgacaggctgaaaccgcaggttaatgttgacagcttcagcctcgaacaggcagtttaacgcgccaacttaagtgcagtcttcggtacacagctacagcaaagaatggtgccatcatcgcccattgcactttttttcagcggcgtgacttcgccttctaaaagctgaacacggcaacttccacaaatgcccgcgcggcaagaataagggatacgaattccctgattttctaattgctccagcaacacctgttggttatttccacgaaatgcctgtccctgccagtcaatatctacatttgcgtccggttgttgcgtgatgttggcggtatcatcagcggcagctgcgccgtaaatttttgccggagccgttgccagaatttccacctcatcgccaacgcgaatcacgccgctattacgggcaattaaattctgaccaaaatcgacatcgccgttatcctgggcagtgcggaaagattgcaatgtttttaatggttcgcctgccggatgtttttgccctttttctgggctgacggtggtgaaaatacagcggctacaaggtttaaccacatcaaacaccacatcaccaatgcgaatcactttccagcgatcttcttcccaggcactcgcgccggaaaccaccagattggggcggaattgctccatttttacactggccggacaacgttgttggagatcacgtaagctggcttcgttagcaagaaggtaaggatagccatcagcaaaactcagaggtacagtgttgtggcgtttcacgcgccgggtcatttgtggccccacccagcgtaattgcacttcgcgggagaaaaatccacttagccatttgttgatcgcgtctggcgcaattcgcgcggtaaaatgtgtgccccaaacttcggttggtgcgtcttgtgtggcgaaatcagcaaaacgaacatatgcgctactgccatctggtgcggtgagatgcaagccatcatgcacaggactaggagtaaaccgtaccatctggggaaactggcgagcggtaataaacgtaccgtcaggttccgtgatcataaagatgcgatcgaaggccagaccactgacatctgccagagcatgtgtaagaccaatgccgcgcatgcttttaacaggatgaataaaaagccggattaatgtcgccacggtgcggtcctcaaatgaaaataagccctcaactttatgacatgacgcgcttattagctataatgcgcaacaattttcttagcgcctgtcccattaggctattttatttgtcagtttggccctgggttatgctcgaaatcctcacgtacttgtgtacgctccggtttctccgcgctgtccatgtccagactgactgcaacaattacgcctactgcggtaggctcttagagtaaaagtgacgatatgaattctctgtttgccagtacggcccgtgggctggaagagctgttaaaaactgaactggaaaacctgggggccgttgaatgccaggtggttcagggtggggtccatttcaagggcgacacacggcttgtttaccagagcctgatgtggagccgcctggccagccgtattatgttgccgctgggcgagtgtaaggtttacagcgatttagacctctatctcggtgttcaggcgatcaactggacagagatgtttaatcctggcgcgaccttcgctgtccacttcagtggtttgaatgacaccatccgcaacagtcagtacggcgcgatgaaagtgaaagacgcgatcgtcgatgctttcacgcggaaaaatctgccgcgtccaaatgttgatcgcgatgcgccggatatccgcgttaacgtctggctgcataaagaaaccgccagtatcgctcttgatctgagtggtgatggtttacatctgcgtggctatcgcgatcgtgctggtattgcgccgatcaaagaaaccctggcagccgctattgtgatgcgatccggctggcagccaggaacaccgctgctcgatccgatgtgtggttccggtacgttgctgattgaagcagcgatgctggcgaccgatcgcgcaccaggcttgcaccgtgggcgttggggctttagcggctgggcgcagcatgatgaagctatctggcaggaagtgaaagcggaagcgcaaactcgcgcccgtaaaggcctggctgagtatagctctcatttttacggtagcgacagcgacgcacgggtgattcaacgtgcacgcactaacgcccgtcttgcggggattggtgaactgatcacctttgaggtgaaagatgtcgcgcaactgaccaatccgctgccgaaagggccgtacggcacagtgttgagcaacccgccatacggggaacgtctggacagcgaaccggcgctgattgcgctgcatagcctgctgggtcggatcatgaaaaaccagtttggtggctggaatctctctttgtttagtgccagcccggatctgctaagctgcttgcagctgcgtgcagacaaacagtacaaggcgaaaaacggcccgctggactgcgtacagaaaaattaccacgttgccgaaagcactccagacagcaaaccggcgatggtagcggaagactacaccaaccgcctgcgtaagaacctcaaaaaattcgagaagtgggctcgccaggaagggattgaatgttaccgcctgtatgacgccgatctgccagaatataacgttgccgttgaccgttatgccgactgggtggtggtgcaggagtatgcgccgccaaaaactattgatgctcacaaagcgcgtcagcgtctgttcgatattatcgctgcaaccattagcgtactggggattgcgccaaacaaactggtgctgaaaacccgtgaacgccagaagggcaaaaaccaataccagaaactgggcgagaagggcgagtttcttgaagttaccgaatataacgctcacttgtgggtgaacctgacggattatctcgatactggtctgttcctcgatcaccgcatcgcccgtcgtatgctcggtcagatgagcaaaggcaaagatttcctcaacctgttctcttataccggcagcgccaccgtgcatgcgggattaggcggtgcacgcagcaccaccaccgtggatatgagccgtacttatctggaatgggcagaacgcaacctgcgtctgaatggcctgaccgggcgtgcgcatcgcctgattcaggccgattgcctggcgtggctgcgtgaggcaaatgaacagttcgatctgatctttatcgatccgccaaccttctctaacagtaaacgaatggaagatgcgtttgatgttcagcgcgatcatctggcgctgatgaaagatttgaaacgtctgctgcgtgcaggtgggacgatcatgttcagcaacaacaaacgtggcttccgtatggatctcgacggcctggcaaaactgggactgaaagcacaagaaattacgcaaaaaacgctctcccaggatttcgcccgtaaccgccagatccacaactgctggctgattaccgcagcctgaaaggaatagtaatgagtttaatcagtatgcatggcgcatggctgagcttcagcgacgcgccgcttctcgataacgcagaactgcatatcgaagataacgaacgtgtttgtctggtgggccgcaacggcgcaggcaaaagcacgttaatgaaaatcctcaaccgtgaacaagggctggatgacggtcgcattatttacgagcaagatttgattgtagcgcgtctgcaacaggatccgccgcgtaacgttgagggtagcgtttatgatttcgttgccgaaggcattgaagaacaagcggaatatctgaaacgctatcacgatattagccgcctggtgatgaacgacccgagcgagaaaaatctcaacgaactggcgaaggttcaggaacagctggatcaccacaacctgtggcagctggaaaaccgcatcaacgaagtgctggcgcaactggggttagatcctaacgttgcgctgagcagcctttccggcggctggttgcgtaaagcggcattaggacgcgcgctggtgagtaatccgcgcgtgctgttgcttgatgaaccgacaaaccacctggatattgaaaccatcgactggctggaagggtttttgaaaactttcaacgggacgattattttcatctcccacgaccgtagctttatccgcaatatggcgacgcgcattgttgatctcgatcgcggcaagctggtgacctatccagggaattacgaccagtacctgctggaaaaagaagaagccctgcgcgtggaagaattacaaaatgccgagttcgatcgcaaactggcgcaggaagaggtgtggatccgccaggggatcaaagcacgccgtacccgtaatgaaggccgcgtacgcgccctgaaagcgatgcgtcgcgaacgtggtgaacgtcgcgaagtgatgggtaccgcaaagatgcaggtggaagaggccagccgctccggtaaaatcgttttcgaaatggaagacgtttgctaccaggttaacggtaagcaactggtgaaagatttttctgcccaggttctacgtggcgacaaaattgccctgattggtccgaatgggtgcggcaaaaccacgctgctaaaactgatgctcggtcagcttcaagcggacagcgggcgtattcacgttggcaccaaactggaagtggcttatttcgatcagcaccgcgcggaactggatcccgataaaacggtgatggataaccttgccgaaggtaagcaagaggtgatggttaacggcaagccacgccacgtattgggctatttgcaggactttctgttccatccgaaacgggcgatgacgccggtacgtgcgctttctggcggtgagcggaaccgcttgctgctggcgcgtttgttcctcaaaccaagcaacttattgattcttgacgaaccgaccaacgatcttgatgtcgaaacgctggaactgctggaagaactgatcgacagctatcagggcacggtattgctggttagccacgatcgtcagtttgtcgataacaccgttacagaatgttggatcttcgaaggcggcggtaaaattggtcgttatgtcggcggttatcatgatgcccgtggtcagcaagagcagtatgtggcgctcaaacagcctgcggtgaaaaaaaccgaagaagccgccgcggcaaaagcagaaactgtaaaacgcagcagtagcaaactaagctataaattgcagcgcgaactggagcagctaccgcaattgctcgaagatctggaggcgaagctggaagccctacagacgcaagtggcggatgcttccttcttcagtcagccgcatgagcagacgcaaaaagtgcttgctgatatggctgctgcagagcaggagctggagcaagcctttgaacgctgggagtatcttgaagcgttaaaaaatggtggctgatcgcaaaatagtcgatttaaacagagacagctgacaacggtaaaattgcctgatgaactgggtttatcaggcatgaaaaccaacactttgttagtcatctgtaaaatagcgcatcattaaggagtaccaatgtgcgaacatcatcatgccgcgaagcacatcctgtgcagccagtgtgacatgctggtggcgttaccgcgccttgagcatggtcagaaagcggcatgtccccggtgtggcacaacgttaaccgtggcgtgggatgcccctcggcagcgtcccaccgcctatgcgttggctgcactgttcatgctgttgctgtccaacttgtttccttttgtgaatatgaacgttgcaggagttaccagtgaaattacattactggaaattcccggcgtgcttttttctgaggactacgccagcctcggcacctttttcctgttgtttgtgcaactggttcccgcgttttgtctgataaccattctgttactggtgaatcgcgcggaattaccggtccgtttaaaagagcaactggcacgggtgctttttcaactcaaaacctggggaatggcggagattttcctcgcgggtgtgctggtcagtttcgttaaactgatggcttacggcagcattggggtaggcagcagctttctcccctggtgtttattttgtgtcctgcaactgcgcgcttttcagtgcgttgatcgtcgctggttatgggacgacatcgccccgatgccagaactgcgccagccgctaaaaccaggcgtcacggggatacgtcaggggctgcgtagctgctcctgttgtacggcaatccttcctgctgatgaacccgtgtgcccgcgttgtagtaccaaagggtacgttcggcgtagaaacagcctgcagtggacactcgcgctgcttgtaacgtccatcatgctgtatcttccggctaatattttgcccatcatggtgacggatttattaggcagcaagatgccgagcacgattctcgctggggtcattctgttatggagcgaaggctcttatcccgtcgctgcggtgatctttctggccagtattatggtgccaacgttaaagatgatcgccatcgcgtggctgtgttgggatgccaaagggcatggcaagcgcgacagtgaaagaatgcatttgatttatgaagttgttgagtttgtaggccgctggagcatgattgacgttttcgttatcgcggtgctcagcgcgctggtgcgtatgggaggtttaatgagtatttatccggcaatgggtgcattaatgtttgctttagtcgtcataatgacaatgttttctgctatgacgtttgacccgcgtttgagctgggatcgtcaacctgaaagtgagcatgaggagtcctgacagtatggaatctaataatggggaagccaaaatccagaaagtgaagaactggtctcccgtgtggatatttcctatcgtcacggcgctcattggggcctgggttcttttttatcattacagccatcagggaccggaagtgaccctgatcaccgcgaatgcggaaggaattgaaggtggcaaaaccaccattaaaagccgtagcgttgacgtcggcgtggttgaaagcgccacactggctgatgatttgacgcacgttgaaatcaaagcgcggctgaattccggtatggaaaaattgctgcataaagacaccgtcttttgggtggtgaaaccgcagattggtcgcgaagggattagcggcctgggaacgctgctgtctggagtttatatcgaactgcagccaggcgcgaaaggcagcaaaatggataaatacgatttgctggacagcccaccgttggccccgcctgatgcgaaaggtatccgtgtgattctcgatagcaaaaaagccgggcagctcagcccaggagatccggtgctgttccgtggctatcgggtaggtagcgttgaaaccagcaccttcgatacacaaaaacgcaatatcagctatcaactgttcatcaatgcaccttatgaccgactggtgaccaacaatgttcgcttctggaaagatagtggcattgcggttgatctgacgagtgcagggatgcgtgtggagatgggcagtttgacaacgctgctgagtggcggtgtcagctttgatgtgccggaaggtctggatttagggcagccagtggcaccgaaaacagctttcgttttgtatgatgatcagaagagcattcaggatagcttgtacaccgatcacattgattatctgatgttctttaaagatagcgtacgcggtctgcaaccgggagctccggtagagttccggggtattcgcctgggtaccgtaagcaaagtgccattctttgcgccgaatatgcgtcagacatttaacgatgattaccgtattccggtactgattcgtatcgagccagagcggctgaaaatgcagcttggcgaaaatgcggatgttgttgagcaccttggcgaattgttgaaacgtggtttacgcggaagcctgaaaaccggaaacctggtcactggtgcactgtatgttgatctcgatttctatccaaatacgcctgcaataaccggtattcgtgaatttaatggttatcagattatcccgaccgttagcggcggcctggcgcaaatccagcaacgactgatggaagcgttggataagatcaacaaactgccattgaatccgatgattgaacaggcaaccagtacgctttctgaaagtcagcgcacaatgaaaaacctgcaaacgacgctggatagcatgaacaagatcctcgctagccagagcatgcagcagttgccgacggatatgcagagtacgttgcgtgaattgaatcgcagcatgcagggcttccagcctggctccgcagcctacaacaagatggtggcggatatgcagcgccttgatcaggtgttgcgagaactgcaaccggtgctgaaaacgctcaatgagaagagtaacgcgctggtatttgaagcgaaggacaaaaaagatccagagccgaagagggcgaaacaatgaaaaagtggctagtgacgattgcagcactgtggctggccggatgcagctccggcgaaattaataaaaactattaccagttacctgtggtgcagagcggtacacaaagtaccgccagccagggcaatcgtctgttatgggtagagcaggtcactgttcctgactatctggcggggaatggtgtggtttatcaaaccagtgatgtgaagtatgtgattgccaacaacaacttgtgggccagcccgttggatcaacagttgcgcaacaccctggttgccaacctgagtacgcaactgcccggctgggtggttgcctcccagcctctgggaagcgcccaggacacgctcaatgttaccgtaacggagtttaacggtcgctatgatggcaaggtcattgtcagtggtgagtggctgttgaaccaccagggacaactgatcaaacgtccgttccgtctggaaggagtgcaaactcaggatggttacgatgagatggttaaagtgctggccggtgtctggagtcaggaagccgcttctattgcacaagagataaagcgtctaccttaattataaagatttgtaaatataaccgtctccggtatgttgcctgaggcggtttttttgtctctaacgtgcggaaaaatttgttcctcttcacattttttgtacaaccgacatgcccgtgtagctcacaaatatgacagtggcgtgaattttgcgcattgacggcagttatgattcgcggtattgcttaactgtgattgcacatttagtaatcactgttttcttttccaccagaaaccagtatgagggaaacgaggcatgaagagacaaaaacgagatcgcctggaacgggcacatcaacgtggttatcaggccggcatcgccggacgcagtaaagaaatgtgtccctatcagacgctgaatcaaaggagtcaatggctgggaggctggcgagaagccatggcggacagggtagtaatggcctgattctgtctctttaaaaagaaacctccgcattgcggaggtttcgccttttgatactctgtctgattataatcagaaggcagacgtatcctggaacagaccgactttcaggtcgctggcggtatagatcagacgaccatcaaccagcacttcgccatccgccaggcccataatcagacgacggttaacaatgcgtttaaagtgaatacggtaggtcacttttttcgctgtcggcagtacctgaccagtgaatttcacttcgccaacgcccagcgcgcggcctttaccttcgccgcccagccagccgaggtagaaccctaccagctgccacattgcgtccaggcccaggcatcccggcataaccggatcgccaataaagtggcatccgaagaaccacagatccggattgatatccagttctgcttcaacataccctttgtcgaagttaccacccgtttcggtcattttgaccacacggtccatcatcagcatgttcggtgctggcaattgcgggcctttagcgccaaacagttcaccgcgaccagaggcaagaaggtcttcttttgtataggattcgcgtttatctaccatgttctctgtaagccttattttattgaagcacgcaggatagctaacacgtgtacgctgaacaagtccgatcagttcggaataaaccagttcagccaacgtaatggccatggaaaacggtgacgtccttcctgttggcttgcttgcgcgatacgttcctggatggtttgcatcagcgtcgtttggccttcgccatcccacaccagatttaataataacggcagtgcgtcagtcacatcgtctactgcccagatggtgaatttgccttcttctaccgctttcaccagttcactgtgaagacttaaatggcgaacgttagctgtggggataatgacaccttgtttcccggttaactcacgttgctggcaaatagcaaagaagccttcgattttctcatttaaaccaccgaccggctgggcgcgaccgaactgatcgacactacctgtgatagcgatactctgattcaccggcacatcggcgagggcgcttatcagggcgcagagttcagccatgctggcactatctccatcaacttcactgtaactctgctcaaatgtcaggcttgcactgaaggggatctgttgctcaagctgtagttcgctcatcaggaacgcttgcatgatcatcatccctttcgcatggatattgccgccaagctccgctttgcgttcgatgtcggtgaattcaccatcgccaatatgcacaacgcagctaatgcgagaaggttcgccaaaagcgcgtggatgacccggaaattcaatgacgctaagggcgttaatttgcccgatgcgttcgccttcggtttcaatcaggatttgctcctgaaggatctcatcctgcatacgttcagcgaggaaaccttcgcgccattcacgctgctgcagcattaagtttagctgctcgccggagaaggtgtcgccatcacacagggaggcgacctctttacactggcggaggatccactgcgggctaagcggaagtgtttcttgttcaccggtgtagcgtgctgcttcgcggataagtatcggccaggcatccgctcccggtgcaggtaagtgattatgtctggcggtaaatgtcacccagcgacaccactgggttacactctccgcatcgacaatctgcagagtatcttcaaattcgctataaatagcctgctcactaagctctggctccatctcctggaaatcagccaaactttcgcgttcgcctaccagaatgactttcagcttcaatggcatgctaggcacagagacggggagagggcggctctcatcaaacgcaacccagtcaaaacgctcgcggttaacgatatttttcagccgcatccacagcagaggttgcgccagcagtgtacgcaaagagataatgagaataccgccatttgcctgatgcaccagaccaggctgcagggtaatgtcgccattaaactggcgcaggcagccaaagagttgctccgcttctacccagtcggcagcgacaacttgcgttaaagtcgcaaaattatcatctgcactcactgcgtgacgtaagcggatggagtggccggaaacctcatagtgaccgcccaccagttggcctgcatcgctttgtagcgtacgcgcggcattggcaataagattcagatactcagactcttccggggccttcgccagcataaaagaggaggatgctcgcgtatgcagcaactgctccagcgcaaattgcagccgcggttgagtatcactgaataaaggatcgttttcgtcaatcaaatgtggctgagcaaatatttcctgatagctatcggtatcaggaaccaggtcacgccatgcaagtttcgtaatggtcaaagttgatgttttttagtctgttgtcaaagccgcgattataccgtaaccggcactacagcacacgtagaaagcaccgacaatactcctggcatgggcgttaaagctcacaggatggagattcttttcttcactggcctaaaaagctgatattctgtaaagagttacacggtaacattgagatcgctatgaaatatcaacaacttgaaaatcttgaaagcggttggaaatggaagtatctggttaagaagcatcgcgaaggggagttaatcacccgttacatagaagccagtgccgcccaggaagccgtcgatgtgttgctcagcctggaaaatgaacccgtgctggtaaatggctggattgacaagcatatgaatccggaactggtcaatcgcatgaagcaaaccattcgggcaagacgaaagcgccattttaatgcggaacaccagcatacgcgcaaaaaaagcatcgatctggaatttattgtctggcaacgtctggctggtcttgcgcagcgtcgcggtaaaacgctttctgaaacgattgttcagctgattgaagatgcggaaaacaaagagaaatacgcgaataaaatgtcttctctgaagcaggatctgcaggcattgctgggtaaggaataactgacgaaagtcagttcaatttactaaaggcaaaaaaaaccccgcagcagcggggtttttctaccagacgagaacttaagcctgcggctgagttacaacgtctttgatacctttaacttcgatctctacgcgacgatccggagccaggcagtcgatcagtgcagcacgctgtttcacgttgtcacaggtgttgccagtaaccgggttggattcgcccataccacgtgcggagatcttgtctgccgggatacctttggagatcaggtaatcaacaacagactgagcacggcgctcggacagaccctggttgtaagcgtcagaaccgatgcggtcggtgtaacccagaacaactacggaaccgtctttcggatccaggttgctcagctggctgtacagctgatccagagcagcctgaccttccggtttcagggttgctttgttgaagttgaacagaacgtcagacttcagagtgaagtgcttggtctgtacttccggtgccggagctggagccggagcaactactggagctgcttcgccctgaccgaaacggtaggaaacacccaggctcagcatgccgttgtccggacgagtgccgatggtgtgtgcgtcaccgatgttgttggtccactggtattccagacgggtagcgatttcaggagtgatcgcgtactcaacaccgccagcgaagaccggagaaacgccggtgtcgtggtttttaccataaacgttggatttagtgtctgcacgccataccatgccacccagacgagtgtagatgtccaggtcgtcagtgattgggtaacccagtttagcggtcagttgaacgccctgagctttgtatgcaccgttttcaacgctgcctttgtacggcatacgacctaaccagtcgtaacccatttcaaagccaacatacgggttaacctggtaaccaccaaaagcaccagcgcccagttggttttcatgggtcgggccattgttgttgatgaaaccagtgtcatggtactgggaccagcccagtttagcaccagtgtaccaggtgttatctttcggagcggcctgcgctacggtagcgaaaccagccagtgccactgcaatcgcgatagctgtctttttcattttttgcgcctcgttatcatccaaaatacgccatgaatatctccaacgagataacacggttaaatccttcaccgggggatctgctcaatattaactctaccgatatcttcggcttatgccgagcacccctggcgatgtaaagtctacaacgtagttgaaaacttacaagtgtgaactccgtcaggcatatgaaaaaaaagtcttgtataaggtatgtttaatcttttttgtcagcgacaatttacagaagagaatcgcggaaaccgcttcagacaagcctccgcaaggaaaattagtcacgactgaaagcattggctgggcgacaaaaaaagttccaggattaatcctaaatttacttaatgatacaaattagagtgaatttttagcccggaaagttgtctcgtggcgtgagaggatgcgcttaccggacgcataataaaccccatagcgttaccttcatttgccgcatcaacaagttcagcatgctcttcttcagtcaaatcatctgccaaccaaccgatcaccacactgtaattgcccgtgcgtaaagcgcgaaccatactctccacagtgtggcaaggggagagctggctaatctgcattactttcgttaagggtagcccagatgcctgaacccattcccgactcagtttttgttgcggtgttaaccagagttgccagcggctttgctgaccgagttgctgtaacaatggcaacagtagaagttgcgtcatcatgggctgatcttcgcgatagacaacttcactgataagcccggctgtagtgttttccgtagagacacgcgcaattttacttgctgcggaactgaagctgctagaacgatgtgcatagccactagtgtacataatcaatccagcccctgtgagttactgtatggatgtacagtacatccagtgacaacaaagatcaaccctattttcggaaagagcctcgcaaattttgtcgttggtgacgggaaaacataaattaatcttgccccttaagaataagttgcctattttcgtagttaacggatccgttaatgtgaatcattcttttatgttatgattttaaaaggaattttatgaaaagcctctcctataagcggatctataaaagtcaagaatacctggcaacgttgggcacaattgaataccgaagtttgtttggcagttacagcctgaccgttgacgacacggtgtttgcgatggtttctgatggtgagttgtatcttcgggcttgtgagcaaagtgcacagtactgtgtaaaacatccgcctgtctggctgacatataaaaagtgtggccgatccgttaccctcaattactatcgggttgatgaaagtctatggcgaaatcaactgaagctggtgcgtctgagcaaatattctctcgatgcagcgctgaaagagaaaagcacgcgcaatacccgggaaagactgaaagatttgcccaatatgtcttttcatctggaagcgattctcggggaggtggggattaaggatgtacgggcgttacgtatacttggggcaaaaatgtgttggttgcgactgcggcagcaaaacagtctggtgacagaaaagattctgtttatgcttgaaggtgccattatcggcattcatgaagctgcgctcccggtggcacgccgccaggagcttgcagaatgggctgactctcttacgccgaaacaggagtttcctgcggaacttgagtaattacgcgctaacaggagtttcctgcggaacttgagtaatctggcgttgcagacgaccaatctcaggcagtaatgcaatcaataatccaacttgttgtacgaccagaggttctttgctgtctgcccgtggttcaagttgctgcatccgctgtttcaggctagctaatgcctcattgacgcgttcttcatcagcaggttgatgatgtaacgcgtcatcaacatagcaaactgcgtcatcaagaaacgccagaatttcaggattagttaactgctcccggtgagcaccgagggcactgatatagctggtaaacgtatggttaaggcacagcaaccgaaacgcggcttcgcgaatttgcggggtaacgttcggctcgctggacatattacttaccacgctcgccagctcagcatcacggttgtgtgcatcgcggcgggcaatacgatacgccagacggttatcacgcccctgatggtattgctccagtatggcatcgagataccgacagttggcctctgtggcacgttcgagcatgcgcggcagattgcgaaactgccagtcaggccagatgtagctcactgccgcccacgcaatggcacaaccaatcagcgtatcgattacgcgaggtaacgctacttcaaaaccttcacccagtaagttaaaacacagtagcaccaaaagtgtgatgaacatcgttgcatgagcgtattgcacgttacggaaggcaaaaaagagcacgccggtaataaccagcagcaccagctgcccttccagacttggcacaaaccacagcacaggaatgccaatggcgatacctaccagcgtaccaataatccttaacttcaggcggtggcgcgtggcgttatagtttggctggcagacaaacaaacttgtcagcaagatccaatacccgtgatgcattccggttatctgaatgatggcgtagccgaagcacaacaccaggctcattcttaccgcatgacggaagagggcggattccggcgtgaagtgacggctaagacgcagccagatatcactcaacccgtgcgggctgtcatcagcgagctcattttcgtcattattatggggtagtgcctgggcctgttcactttcaattgttgccagttgggcatcaatggcgcgtaaattgttcagcaaaaatcccagtgttttgagtaaatcggcgggtgcgccgttatcgcgcatccgctccagcgcagcatcaatatgcgtaaaagcgcgctcaaaatgcggatcatgttgataaggctgacgcaacaaaatacagcgactcagttgctggcacgcctggccctgcatgctcatcagccgctgaaaacggaacagcacgtcgctgtggcgaaaatgttcacgcaatgtttgatactgaatatgagaagagctggcacgctcgtgaatatcctgtgcgacaaagtaataatgcagcgtgcgacgcgttccccgttgaccacgatcgccacgtaagcgggtcagcaggctgagtttcgtctgattcaatgtcgccatcagcagaccgttggcgagagccaaatcgtacagcggtgcctggctttgatcttcaatatcaggatcaaacatgcggctcttgagctcaagataacgcgccagttgttcatagcaacgcgccaggttgtcctgcagcgggcggaccgggaacagcagatgaccaataagtgtcaggacgttgtaccagacggcaccggccagcagatacatcggctgctgataccagtgctcatacagacttgttcccaacatagtgtaaatggcgatcagcaatgcaccgaaggcaattgttgcatagcgttgacccagaccgccgagcaaaatgaagccgctggtagagagcgttaagccaatcgcaaatagccagggccagggaaacagcaattctacactggcgctggcgataaaaaagcagaacagcgtaatgatgaggttacgcaaacgtcccgccagtcggtcatcgagatcggtcagcgccgctgccaccatccccagcgttagcggaatcgtcagttttacatcacccagccaccacggaaacgctgtggttccacaaagcgcaataaaaatacgcgcgtaatacagccaggcgctgttccaggtatagcgtttgagcaaaggacttagcataaaggccatattagtggattattcaaaacgacgacgtgcattggcttcacgcgcagcttgcgctgtttctacgcttaccacgcgacgaccaaccggccatagtgcaatagcggcaattttaaagttcgcaatgccgacaggaatgccaatgatactaatacattgtgcgatgcccgttgcaatgtgcatcaggcataaccaccagccaaagaaaatcagccagaaaatattcaataccgtaccgccagtattcagcagcacatttttgccagccgggttcagttcatcgacatgaatagcttcattgccataaggcaccagagacagtttagtgatctcccagcaggatcgtgtcagcggtaaggtaaaaatcagcacaatactgaccagagtcgccaacagccagcccagagtggtggcaaatccgccaagcacaaagttcagaatgttcaaaacggtacgcataaaacctcgctttactgtggttttcagtaatgggcggcaattgtaacgtttttttgggctggagcacgttttctctgacggttacactgataagaaataatttcgtgtggatctacagagtcatggaactgaaagcgacaacgcttggaaaacgtctggcacagcacccttacgatcgggcggtgatcctcaatgccgggattaaagtctccggcgatcgccacgaataccttattcctttcaatcaattactggcgattcactgtaagcgcggtctggtatggggcgagctggaatttgtactgccggacgaaaaagtggtgcgtctgcacggcaccgaatggggcgagacgcagcgtttttaccatcatcttgatgctcactggcggcggtggagtggcgagatgagcgaaattgcgtctggtgttttacgccagcaactggatttgattgccacgcgcactggggaaaataaatggctgacgcgtgagcaaacctctggcgtgcagcaacaaatccgccaggctttgagcgcgttgccgttgccggttaaccgactggaagaattcgataactgccgtgaggcgtggcgtaaatgtcaggcctggttgaaagatattgaaagcgctcggttgcagcataaccaggcgtataccgaagccatgcttaccgagtatgcggattttttccgccaggtcgagtctagtccgctgaatccggcgcaggcccgggcagtcgttaatggcgagcattctctgttagtgctggcaggtgcaggaagcggaaaaacgagcgtgctggtggcccgtgcaggctggttgctggcgcgtggtgaagcgtcccctgagcaaattttattgctggcgtttggtcgcaaagccgctgaagagatggacgagcggattcgcgaacggctacataccgaagacattaccgcacgcacgtttcatgcgctggcgctgcatattattcagcagggcagcaaaaaagttccgatagtcagcaaactggaaaatgataccgctgcccgtcatgaactctttattgctgagtggcgcaagcaatgcagcgaaaagaaagcgcaggcgaagggctggcggcaatggctgacggaagaaatgcagtggagtgtgccagaaggtaacttctgggatgatgaaaaattacagcgtcgccttgcctctcgcctcgatcgctgggtaagtctgatgcggatgcacggtggtgcacaggcagaaatgattgccagtgcacccgaagagattcgcgatctgttcagtaaacgtatcaagttgatggccccgttattaaaagcctggaaaggtgcgctgaaggcagaaaacgctgtcgattttagcggccttattcatcaggcgattgtgattctggagaaaggtcgctttatcagcccgtggaagcatattctggttgatgaatttcaggatatcagcccgcagcgggcagcgttgttagcggcattacgcaagcaaaacagtcagacgacgttgttcgctgttggtgatgactggcaggcgatttaccgattcagcggtgcgcaaatgagcctcaccaccgctttccatgaaaactttggtgaaggcgaacgctgtgatttagacacgacttaccgttttaacagtcgtatcggtgaggtggcaaaccggtttattcagcagaacccaggccagctgaaaaagccgctaaacagcttaaccaatggagacaaaaaagccgtcacgttattggatgagagtcaacttgacgctttgctggataagctctctggttatgccaaaccggaagagcgcattctgatcctggcgcgttaccatcacatgaggcctgccagcctggaaaaagcggcaacacgctggccgaagttgcaaatcgactttatgaccattcatgccagcaaagggcaacaggcggattacgtcatcatcgttggcttgcaggagggaagtgatggttttccggctgcggcgcgggagagcattatggaagaggcgctactgccaccggttgaggatttcccggacgctgaagaacggcggttaatgtacgtggcgctgacccgggcacgccatcgggtatgggcactgtttaacaaagagaatccctctccctttgtggaaatactgaaaaatctggatgtgccggtggcgagaaaaccgtaagaaacaggtggcgtttgccacctgtgcaatattacttcagacggtccgcgagataacgctgataatcggggatcagaatatcgaccgcgtcgttgaaatgcgggctctggattatgaagtctgccgttgccacgttggtggcgaccggaatgttccataccgtcgccagacgcagcaaggctttcacgtcaggatcgtgcggcacggcatttagtggatcccagaagaaaatcaatacatcaattttcccttcactgatcaatgcgccaacctgctggtcaccccccattgggccactcaacatcgcgttgacgttcatgccggtcgcgcgggaaattaagttaccggtagtgcctgttgcatacagtacgtgttgttccagtaacggttgatgccgttccacccagctcatcagcatttgtttgcagtgatcgtgtgccaccagcgcaatatgtttccgcgcaggtaaagtgcgagtcgtcagttccataatgtacatccgtagttaactttcctacagattactgtaagcacttatcgctgcaagataaagaccgaaaaagcctgcgcacaggcacaaaaatctcaggaagatggttgtttttccgcccactgcaggaaagtatttcgcgtttgtgggtcagccagtttaaaccaatacttcagccgttgttctgtgagcacctgagactgcggtggaatagcatccagctcggaaacaccgctaagcagcgtactgtcatctgccatcatcgtggcaaattgcggtagactagcgcgtttcgcggatttgttatagcgttcaacctcgacctcataatcaatcgtttttgccgtactggtaatggcgagaatatccagctttaccggaatcggcgtcgcatcgccatccaacaattcaaggcgcggcgcggcatcaaaatggttagcttcccgctcattctccaggcgaggcaggcgaaaattgacctggttgatgagctgggtattaaaactgaccaccagcggtggggagatatacagccgttcttcactattggaaagatgaatcgtcttctcaacgcgaaacactaactgatgcggtccattatccagttcaatgctgtccgcaccgcgcagcagagagctggaaaccttcttgccgtcgagtaccagaagatcgacatcggtactaagccgcagcgtggtggcaaaaacggataccggcaaacataatgcaatcaaggtggtcacgatgccggttttcataggtagctcctgtcaaaagaccgcccgaataataatgtgtcaaaatttttctttaatcatacttactaacatatagacatatttcccgcttttgctctcattcattcgtattagctgcatggttggcatgtcggctttgtcgtacactttgttaaacagtctggaggaaataatgaaagaaaccgatattgcaggcattttaacgtccactcacaccattgcgctggtgggggcaagcgacaaacccgatcgtcccagctatcgcgtgatgaaatatctactcgaccaggggtatcacgtcattccggttagcccaaaagttgccggcaaaacgctgctgggccagaaggggtatggcacgctggcagacgttccggaaaaagtcgatatggtcgatgttttccgtaatagtgaagcggcgtggggcgtggcacaggaagctattgccattggcgcgaaaactctctggatgcaactgggggtgattaatgagcaagcggcagtactggcacgggatgccgggttaaatgtggtgatggatcgctgcccggctattgagatccctcgcctgggcctggccaaataaaaaatccccggaaggcaaaaaccttccggggatttgttcagggattagttacgcagacgcggggcctggagttgtttgcggatggtctgcgccagctcatccatggatggctgttcaggatgttcatcctgcaattcgctacttagctgggcttcagccaggtaggtatgaaccggtaggccgttatcgtcctccatcactacgtgataccacggagcggcgcgaagctcgtcattcaccgccagctcatcagggctcggttcagagaggctataaaccgggtcgatatccacgaccactccgagataacctaacagggaatggcggacctgctggccgataccgaatttgctggcaatcatagtcacctcccgggaaatctttacctttgatataagggtaaaattccacatttcaagttacatgacgcgacaggcaaaccctttcagatatagcccttccggataggtagcgatcaccggatgatcggctgcctgacggaactgctctataaattgtacatcacgaccggcatcaattgcggcatccgcgatgattttctgaaataaatcgctggtcatcagaccggaacaggagaaagtcaggagaataccgccttcattcagcagctgaatcgccagcatgttgatgtctttataaccacgacacgcgcccatcaactggcttttattctcaacaaacttcggcgggtccatcacgataacgtcaaatttttcaccgcgatcgcgataagtacgcagcaatttaaagacatcatcacggacaaactcagccttgctcagatccagtttgttcagctcaacgttctgccgtgcaatatccagcgcttcctgggaggtatcaacgctgacaacctggctgcaaccgcccatcagtgcgcttacggcgaaaccaccggtataggagaaacagttcagcacacgtttattttcaacgtagcggcgggtagccaggcggctatcacgctggtccaggtagtagcccgttttgtgtccgtgctgaatatccaccagcagtttcattccgtgttcttcaatcggcagcagggcaggtggcaactcgccggtgacggggccctgggtcagctccattccttcttttttacgtaccgcgacgtcgctgcgatcgtaaatgctacattccgggtacagcgtttgcagggcactaattaatgccgcgcgctgatattctgccccagcactcagcagttgcagcaccagaaaattaccgaaacgatcgatagtaatacccggcaggccatcagattctccggcgattaaacgatagctgtcgaggccatctttttgcgccagccagtcacgccatttttgtgcttgttgcaaacggcgggaaaaaaaagcaatgtcgatagactcagacgggtcaaacgtccagacgcgcgcccggatttggctagctgggctataagcgccgcgtgctaaccattttccctgatgatcaacaatatcgatggtttcaccgaggctggctttaccttccatgcgggcaacggccccggaaaagacccacggatggcgacgaagtaatgatttttcgcgccctttggctaacactaaacgtacactcataatttacttttctgtcgatgcaaagaaatgggcgtcattgtccggagttttccatggatttgcaacgcgtccattaaggataaggagagcagcaatgagcaaagtctgcataattgcctgggtttacgggcgagttcagggcgtaggatttcgctacaccacacagtacgaagcgaaaagactgggtttaaccgggtacgccaaaaatcttgacgatggcagcgtggaagtggttgcttgcggtgaagaagggcaggtggaaaaattaatgcagtggttaaagagtggcggcccgcgttctgcgcgtgtagaacgggtgctcagcgagccgcatcatcccagcggggaattaaccgattttcgtatccgttaaatacattttaccggttttggcaggccagcaattttggtggcttgcttagccggacctttcggaaacagtcggtataaatagcggctgttacctttttcttcgccaaatttattcgccatcgcttttaccagcatacgaatcgccggagaagtattgaattccagatagaaatcacgcacaaaacgcaccacttcccagtgttccggactcaggctaatcccttcgttctctgcaatcaccacagccagcggctcactccactggctgctttctttgagatagccttcggtatccgtttctatctctttaccttcgaagatcagcataattattactaccttaatcagactggcggcagtgtaacaaaaaacaaagccccgcataaagcgaggctatgaaagtgttagcgggtgagattaatcgcggctagcgaagcccagaatgctcagcaggctgacgaagatgttgtacaggctaacatacaggctaaccgtggcacgaatatagttcgtctcaccgccatgaatgatgttgctggtttcaaacaagatagcgccagaggagatcagaatgaagaccgcgctgatcgccagatgcagagcaggcagctgcaggaagatattcgcaaccataccaatcagcaccaccacaatacccgccatcagcataccgccgaggaagctcatatctttgcgggtggtcagcacatatgcagagcagcagaagaacactaacgccgttccgcccagtgccatagcgattacgtcacccattccggcagacagataggtgttcagaataggtccgaggatataacccagaaaaccggtaaaggcgaatgcggagataatcccggtcggcttattcgccgttttataggtcaggaacatcaaaccatacatacccaccagcgtcagaatcagacccggagatggcagcatcagcaccgtactggcagttgcggtaatcgcgctaaaggccagcgtcaggctcagcagaaaataggtattacgcagcaccttatgggtgctaagcagacttgtacggtcatgactagaactaacaatacgatccattgagtcactctctatgacagatgtaattaattaagcagcataatgataatgcgtaagggcacccagaagttttacccatctttacgcatttgatctggaacaggtttaacagcggattatcaggtcattaagcaaatataacgccctgagaatttcgacaggcaaaagaaaaaggggttagcatttagctaaccccttatcttatttggcggaagcgcagagattcgaactctggaaccctttcgggtcgccggttttcaagaccggtgccttcaaccgctcggccacacttccggaatgacgcgcactataaacatcccgatgcggcgtgtaaacccctaatttgtttgtttgcctgaaaaacagccaaaagtgcattgatagcgtgaaataacagcagattgatcatttcatcaccatgaattccttctcttttactcgtttagcaaccggctaaacatccccaccgcccggccaaaagaaaaataggtccatttttatcgctaaaagataaatccacacagtttgtattgttttgtgcaaaagtttcactacgctttattaacaatactttctggcgacgtgcgccagtgcagaaggatgagctttcgttttcagcatctcacgtgaagcgatggtttgccttgctacagggacgtcgcttgccgaccataagcgcccggtgtcctgccggtgtcgcaaggaggagagacgtgcgatatgaataacgaggaaacattttaccaggccatgcggcgtcagggcgttacccggcgcagctttctcaaatattgtagtctggctgccacgagcctgggattaggcgcgggaatggcaccaaagattgcctgggcgctggagaacaaaccgcgcattccggtggtatggatccacggtctggaatgcacctgctgtaccgaatcttttatccgctccgctcacccactggcgaaggacgtcatcctttccctgatttccctcgattacgacgatactttgatggctgccgccggaacccaggcggaagaagtctttgaagacatcatcacgcaatacaatggcaaatatatcctcgcagtagaaggtaatccgccgctgggcgagcaggggatgttctgtatcagcagcggtcgaccgtttattgagaaactcaaacgtgccgctgccggagccagcgcgattatcgcctggggaacctgcgcgtcctggggctgcgtgcaggccgcgcgacccaatccgacgcaggcaacgcctatcgacaaagtcatcaccgacaaacccattatcaaagtacctggctgcccgccgatcccggatgtgatgagcgccatcattacttacatggtgacctttgatcgcttgccagatgtcgacagaatgggccgtccgctgatgttctatggtcagcgaatccacgataaatgctatcgccgcgcccacttcgacgccggagagttcgtccagagttgggatgatgacgctgcccgcaaaggttactgcctgtacaaaatgggctgcaaagggcctaccacctataacgcctgttcctccacacgctggaatgatggcgtttctttcccaatccagtctggtcacggctgcctgggctgtgcggaaaatggtttctgggatcgcggtagcttctacagccgcgtggtcgatattccgcaaatgggtactcattccaccgccgataccgtcggtttaaccgcgcttggcgtggtggcagcggctgttggtgtgcacgcagtcgccagcgccgttgaccagcgcagacgtcataaccagcaacctacagaaaccgaacatcagccaggcaatgaggataaacaggcatgagcactcagtacgaaactcagggatacaccatcaataatgccggacgccgcctggtggtcgacccgattacgcgcatcgaaggccacatgcgctgcgaagtgaatattaacgatcagaatgtgatcaccaatgccgtctcctgcggcaccatgtttcgcgggctggagatcatcctacaagggcgcgacccgcgcgatgcgtgggcgttcgttgaacgtatctgcggcgtctgtactggcgtacacgccctggctagcgtttacgccatcgaagatgctatcggtattaaagtgccggacaacgccaatatcatccgcaacattatgctggcaacgctctggtgccacgatcatctggtgcacttctatcagcttgccgggatggactggatcgatgtgttagatgcgctgaaagccgacccgcggaaaacctccgaactggcgcaaagtctctcctcttggccgaaaagttcccctggctatttcttcgacgtacaaaaccgcctgaaaaaatttgttgaaggcgggcagttggggatcttccgcaatggctactgggggcacccgcagtacaaactgccgccagaagctaacctgatgggctttgcccactatctcgaagctctcgatttccagcgtgaaattgtcaaaatccacgcggtctttggcggtaaaaacccgcatccaaactggattgtcggcgggatgccttgcgccatcaacattgacgaaagcggcgcggtcggggcagtcaatatggaacgcctgaacctggtgcagagtattatcacccgcacggcggacttcattaacaacgtgatgatccccgacgccttagccatcggtcagttcaacaaaccgtggagcgaaatcggcactggtctttctgataaatgcgttctcagctacggcgcattcccggatattgccaacgactttggcgagaaaagtctgctgatgcctggcggcgcggtgattaacggcgacttcaacaatgtgctgccagtggatttggttgatccgcagcaggtgcaggagtttgtcgaccacgcctggtatcgatatcccaacgatcaggtcgggcgtcatccgttcgatggcatcaccgacccgtggtacaaccccggcgatgtcaaaggcagcgataccaacattcagcagctgaatgaacaggaacgctacagctggatcaaagcgccacgctggcgcggtaacgcgatggaagtggggccgctggcgcgcacgttaatcgcttatcacaaaggcgatgctgcgaccgttgagagcgtcgatcgcatgatgagcgcgttgaacctgccgctttccggtatccagagtacgttaggccgcattttgtgccgcgcgcacgaagcgcagtgggccgcaggtaagttgcagtatttcttcgacaagctgatgaccaacctgaaaaacggcaatctcgccactgcttccacggaaaaatgggaacctgcaacctggccgacagagtgccgtggtgtcggttttaccgaagcgccgcgcggggcgttaggccactgggccgccattcgcgatggcaagattgatctctaccagtgcgtggtgccgaccacctggaacgccagcccgcgcgatcccaaagggcagattggcgcttatgaagcggcgctgatgaacaccaaaatggcgatccccgagcaaccgctggagatcctgcgtactctgcacagctttgacccgtgcctcgcctgtagtacacacgtgctgggcgacgacggtagcgagctgatctccgtgcaggtgcgttaacagcgaaggagaatcatcatgcaacagaaaagcgacaacgttgtcagccactatgtctttgaagcgccagtgcgcatctggcactggttgacggtgttatgcatggcggtgttgatggtcaccggatactttatcggcaagccgctaccttccgtcagcggcgaggcgacgtatctgttctatatgggctacatcaggttaattcacttcagcgccgggatggtttttaccgtggttttgctgatgcggatctactgggcttttgttggcaatcgatactcccgcgagctgtttatcgtgccggtatggcgtaaaagctggtggcagggcgtgtggtatgaaatccgctggtatctgtttctggcaaaacgtccgagtgccgatataggccataatcccatcgcccaggcggcgatgttcggctatttcctgatgagcgtctttatgatcatcactggttttgcgctgtacagcgaacacagccagtacgctatttttgcgccgttccgttatgtggtggaatttttctactggacgggtggcaacagtatggacattcacagctggcatcggctggggatgtggctgattggcgcgtttgtgatcggtcatgtctacatggcgctgcgtgaagacatcatgtccgacgacacggtgatctccaccatggtcaacggctaccgtagccacaaatttggcaaaataagtaacaaggagcgtagttgagctaaataagtaacaaggagcgttcatgagcgagcaacgcgtggtggtcatggggctgggcaacctgctgtgggccgatgaaggcttcggcgtgcgggtggcggaacggctgtatgcccattaccactggcccgagtatgtggagattgtcgatggcggtactcagggactgaacttgctggggtatgtcgaaagcgccagccatctgttgattctcgatgccattgactacgggctggaacctggaacgctgcgaacctatgccggagaacgcattccggcttatctcagcgcgaagaaaatgagcctgcatcagaacagtttctccgaagtgttggcgctggcggatatccgcggacatctgccagcacatattgccctcgtcggtctgcaacccgcaatgctcgacgactacggcggtagcctgagcgaactggcacgggagcaactgcccgctgcggaacaggcggcgctggcgcagcttgctgcgtggggaattgtgccgcaaccggctaatgaaagccgctgtctcaattatgactgtctgagcatggaaaattacgaaggcgttcgcttgcgccagtaccggatgacacaggaggagcagggatgagcaacgacacgccatttgatgcgttgtggcaacgaatgctggcgcgcggctggacgccagtcagtgaatcccgtcttgacgactggcttacgcaagcgccagacggcgtggtgttattaagcagtgacccgaaacgcacgccagaggtcagcgataatccggtaatgattggcgaattactgcgcgagtttcccgactatacatggcaggtggcgattgctgaccttgagcagagcgaagccatcggcgatcgctttggcgtctttcgctttcctgccactttagtgtttaccggcggaaactatcgcggcgtgctgaatggtattcacccgtgggcggaactgataaacctgatgcgcgggcttgtcgaaccgcagcaggagcgtgccagttgatctaaccgcagcaggagcgtgcctcatgagcgaaacttttttccatctgctggggccaggaacgcaaccgaacgatgacagtttcagcatgaatccactgccgatcacctgtcaggtgaatgatgaaccgagtatggcggccctggagcaatgtgctcacagcccgcaggtgattgcgctgttaaacgagttacaacatcaactaagcgaacgccaaccgccgttgggcgaggtgctggcagtcgatctgttaaatctcaacgccgacgatcgtcactttatcaatacgcttctcggggaaggggaagtgagtgtgcgcattcagcaggctgacgacagtgaaagtgaaatacaggaggcgatcttctgcggattatggcgggtgcgcagacgtcgcggcgaaaagttgctggaggacaaactggaggctggctgcgcgccgctggcgttgtggcaggcggcaacgcaaaatctcttgccgacagatagcctgttaccgccgcccattgatggcctgatgaatggcctaccgttggcgcatgagttactggcacatgtacgtaaccccgacgcgcagccgcacagcattaatctgacgcaattacccatcagcgaggctgatcggctttttctcagtcgtctctgtgggccgggaaatattcagattcgtaccattggctatggcgagagctatatcaacgccacggggttacgccatgtctggcatttacgctgtacggacaccttaaaaggcccgttactggaaagttatgaaatctgcccaataccggaagtggtgctggcagcgccagaagatttggtcgactctgcgcagcggcttagcgaggtatgtcagtggctggcggaagctgcaccgacgtaaaaagacggtaagtatcgctttcagtcttatgaatatcgcaatcggcgaatacctctggtcgtagagtttcaggataaagagggagatctaccattatcgggttatttttctctcttcgcctacaggagtgcgcatgtgggatgtcattgatttaagccgctggcagtttgctctgaccgcgctgtatcactttttatttgtaccccttaccctggggctgatttttttgctggctattatggaaaccatttacgtggtcaccggcaaaacaatctaccgcgatatgacgcgcttctggggtaagctcttcggtatcaattttgctcttggcgtggctaccggcctgaccatggagtttcagtttggtactaactggagtttctattccaactatgtgggcgatatttttggcgcaccgctggcgatggaagcattaatggccttcttcctcgaatccacctttgtcgggctgttcttcttcggctggcaacggctgaataaataccagcacctgctggtgacgtggctggtggcgttcggtagtaatctctctgcgttgtggatattgaatgccaacggttggatgcaatacccgaccggtgcgcattttgatatcgacaccctgcgtatggagatgaccagcttcagcgagctggtctttaatccggtcagccaggtgaaatttgtgcacaccgtaatggcgggctacgtgaccggggccatgtttattatggcgatcagcgcctggtatttactgcgcggacgggagcgcaatgtcgcattacgcagctttgccatcggttccgtcttcggtactctggcgattatcggtaccctgcaactcggagacagttctgcgtatgaagtcgcgcaagtacaaccggtaaaactggcggcgatggaaggggagtggcaaacggaacctgcacctgcaccgttccatgtggttgcctggccggaacaggatcaagagcgtaacgcctttgccctcaaaattcccgcgctgctagggatcctcgccactcacagtttagataaacccgtgccgggtctgaagaatttgatggctgaaacctacccacgcttgcaacgcggacgtatggcctggctgttaatgcaggaaataagccaaggcaatcgtgagccgcatgtgttgcaggcattccggggactggaaggtgacctgggctacggcatgttgctctcccgctatgcgccggatatgaatcatgtcacagccgcacagtaccaggcggcgatgcgtggcgcgatacctcaggttgcgccggtattctggagtttccgcatcatggtgggctgtggttccctgctgctactggtgatgctgattgcgcttgtccagacgctgcgtggcaaaatcgaccagcatcgctgggtgctgaaaatggcgctctggagtttgccgttgccgtggattgcgattgaagccgggtggtttatgaccgagtttggtcgtcagccgtgggcgatacaggacatcttaccgacatactccgcgcactccgctttaaccacaggacaactggctttcagtctgatcatgatcgtagggctttacaccctgttcttaatcgccgaagtctacctgatgcagaaatatgcccgtctggggccgagcgcgatgcagagtgaacaaccgacgcagcaacaggggtaaaggagaaaatcatgtttgattatgaaacattgcgcttcatctggtggctgctgattggcgtgatcctggtggtctttatgatctccgacggatttgacatggggatcggctgtctgctgccgctggtggcgcgtaatgatgatgaacgccggatagtgataaacagcgttggtgcacactgggaaggcaaccaggtctggttgatcctcgctggtggggcattatttgccgcctggcccagagtgtatgcagcggcgttttccggcttttatgtggcgatgatcctggtgctgtgcagtctgttcttccgcccgctggcctttgattatcgcggaaaaatcgccgatgcacgctggcgtaaaatgtgggacgccggtctggtcatcggcagtctggtgccgccggtagtcttcggtatcgccttcggcaacttgttgctcggcgtgccgtttgccttcacaccgcaattacgcgtggagtatctcggcagcttctggcaactgctgacgccattccctttattgtgcggattgctcagccttgggatggtgattttgcaaggtggcgtctggttacaactgaaaactgttggtgtgattcatctgcgtagtcagctggcgaccaaacgcgctgcactgttggtgatgctgtgctttttgctggcgggttactggctgtgggtcggtattgatggctttgtactgctcgcccaggatgctaacggtccttccaatccgttaatgaaactggtggcagtgctacctggtgcctggatgaataattttgtcgagagccccgttttgtggatcttcccgctgctgggattcttctgcccattgctgacggtgatggcgatttatcgtggtcgcccgggttggggatttttgatggcaagtttgatgcaatttggcgtgattttcacggcaggcatcacgctgttcccctttgtcatgccgagtagcgtgagtccgatctccagcctgacgttgtgggacagtacttccagtcagctgacgctgagcattatgttggtaatcgtgctgatatttttgcccattgtgttgctctacactctctggagctactacaaaatgtgggggcgcatgacaacagaaactctccgccgtaacgaaaacgagttgtactaaggagcagaaacaatgtggtatttactttggttcgtcggcattttgttgatgtgttcgctctccacccttgtgttggtatggctggacccgcgtctgaaaagttaacgaacgtaggcctgatgcggcgcattagcatcgcatcaggcaatcaataatgtcagatatgaaaagcggaaacatatcgatgaaagcgatcttaatcccatttttatctcttctgattccgttaaccccgcaatctgcattcgctcagagtgagccggagctgaagctggaaagtgtggtgattgtcagtcgtcatggtgtgcgtgctccaaccaaggccacgcaactgatgcaggatgtcaccccagacgcatggccaacctggccggtaaaactgggttggctgacaccgcgcggtggtgagctaatcgcctatctcggacattaccaacgccagcgtctggtagccgacggattgctggcgaaaaagggctgcccgcagtctggtcaggtcgcgattattgctgatgtcgacgagcgtacccgtaaaacaggcgaagccttcgccgccgggctggcacctgactgtgcaataaccgtacatacccaggcagatacgtccagtcccgatccgttatttaatcctctaaaaactggcgtttgccaactggataacgcgaacgtgactgacgcgatcctcagcagggcaggagggagtattgctgactttaccgggcatcggcaaacggcgtttcgcgaactggaacgggtgcttaattttccgcaaagtaacttgtgccttaaacgtgagaaacaggacgaaagctgtagtttaacgcaggcattaccaagcgaactcaaggtgagcgccgacaatgtcagtttaaccggtgcggtaagcctcgcaagtatgctgacggagatatttctcctgcaacaagcacagggaatgccggagccggggtggggaaggatcaccgatagtcaccagtggaacaccttgctaagtttgcataacgcgcaattttatttgctacaacgcacgccagaggttgcccgcagccgcgccaccccgttattagatttgatcaagacagcgttgacgccccatccaccgcaaaaacaggcgtatggtgtgacattacccactagtgtgctgtttatcgccggacacgatactaatctggcaaatctcggcggcgcactggagctcaactggacgcttcccggtcagccggataacacgccgccaggtggtgaactggtgtttgaacgctggcgtcggctaagcgataacagccagtggattcaggttagcctggtcttccagactttacagcagatgcgtgataaaacgccgctgagtttaaatacgccgcccggagaggtgaaactgaccctggcaggatgtgaagagcgaaatgcgcagggcatgtgtagcttggcaggttttacgcaaatcgtgaatgaagcacgcataccggcgtgcagtttgtaatgcataaaaaagagcattcagttacctgaatgctctgaggctgatgacaaacgaagaactgtctaatgcgtagaccggaaaaggcgttcacgccgcatccggccactttcagtttgcaatacgtacgcttgagatcaggattgtctactttgagtataacatccttgtgaaatctccctttcctcataccgcttgcactatatactgcgggtaggaaaggcgcgcagagggaaatataagattgttaactatccccctctggaaatacgacttgtgagcataagataaatcttagcaaaatacaaattaaagataaggaaattgttacgaaagctattaattattgttggtaatatagtttcaagtggtactataactggctgttaaatggcatttataactattaggtgcagagatattcgcttaaatggattagtttctttgtggaaaagtaactgatgttataatgtatgatgttgactatttcactattccaataaaaccagtcagctttaaacaagcagcgtcatattaagagagataaacatttgccgctgttggtcctcgcaggccatttacgcggcaaaattccacacgtaatcctggtataagcacttctgcgtcgcggggagtgaatgcggaaatatggacctgaacttctttacgaccgtcggaggggataatgaatcctttgccgcttttgcgatcaaaggttttgacaattcctgtcattttacgggacaaacaaattccttactgaaaatactgcgctgcactatacggggttaataaaataaagccagcgatatttaagaccgccggacggctaaaataaaatttgcttaatctcaattatcatgcgttaatagctgcgtcggtttgaaagacagacagcatacaaagtagtttactaaagcagttctcattatcaggcattatccccttcttttgagtctctctcctgaacactaagtagtttctgtattaaagccctgtttgccgaaaggcccaaaatgaaggaagtaaaatatgtctaataaaatgactggtttagtaaaatggtttaacgcagataaaggttttggctttatcactcctgatgatggcagcaaagacgttttcgtccatttcaccgccatccagagcaatgaattccgcacgctgaacgaaaatcagaaagttgaattttctattgagcaggggcaacgtggccccgcggcagcgaacgttgttacgctctaaggttgccattattactcaacatctccatttccgctgtccatgttgtcatggttcacagtaccgcacatcggcattcgatgtgacggagcgaaaccctttgggcgctaagtgtattttttgtaaatcgacgatgatcacctttgataacgtcgcgctgcaaatacgcactgaccatgcgccgctggattagtcaaaataatatcaggctccctcgtggagccttttttatatctgccttatttttcttcaacgctgtatgtatagtaagcgataacctgttgattattgaatctttcggggagatggcttataacatttcttacctgaccagggtaccgggaaccaacaccttactggcgtgttgctgtcttttaagaccagaagaggttaacagtgaatattgaagagttaaaaaaacaagccgaaacggaaatcgccgactttatcgcgcaaaaaatcgccgagctgaacaagaatacagggaaagaagtctctgaaattcgcttcaccgcacgagaaaaaatgaccgggcttgaaagttatgatgtcaaaatcaaaataatgtgattttgtgaacatcaccccgtgcgaggtgatgttccgcttgttgctaatttagtgaccaatcattggcgcttgtggaattaagcgtcggtacaattcctccggcaccgggctttgccatactcccgcatacattgcgtaaccaatcaccgcaaacataatccccagaaccagtagcgtcattaaccagccagacaacgcaaaggcttttttatttgccgcaggtttttgcagactaaaggtcaatgtactggctaccggacaactctctacgcaagtcatacagccggtacattccactgttcgtacctgaattaatttatcgaccgggatccgacttgggcaattttttgcgcatttgccacagtcgatacaactttcggcattgcgacgaatcttaaacgggctcaataggctaaccacgcccatcagcgcgccatatgggcaaagataacgacaccaggcatggcgaataaacaggctggcaatcagcaaaacggtcacgctgattaatgtcgcggtccccatatgacgaaagaaatcgagcattttaacgtccatcaccacgctgtaggggctcaacataaaatagtgaatcgcctgagcgggcatcaataacgcgatatagataaaaaaactcaacagcaaatacttcacgccgcgcagaggaatatccagccagcggggaaggacacattgccgaccaaacagtttgttaccgagatcgccgattaattcagaaagcgtaccaaccgggcataaccaactgcaaaaggcctttttgagtaatagactgatgacgataaaagcgaccaataacagcatcgcggcggcgtggacggacggtaactgacctgttacaaggctatatttcagattcatcagcccggcaatcggtagccagccttcgatacctcccggtctggcgacaaatgtcgtgctacttgccgtttcgtaatagcgcacccaataccagaacgtgatggcaatataaatattcattgccaacagtaataattgcgtcgctttacgccaggtcgtggcattacgccagtcattccacggtaatttgccgcccgtcgtgcctggccgccgctgccagcgggttcttttattctctgccatgattttgccagtccgttaagttgtataccaaatgccactattctagttgttcttaactggctgatattgattcaaatcgcgttcaggtctttcttatgcaaccatgcttccagagcggcaacactgcgtgtaatttcttcgtgtggaaggggggcagataatggctgctgctccagttgtgcgcatagctggctggcgatatgcattcccagactgctgcaactgctttttagctgatgcgcggcacgctttattttctcgctatcctgactggcgcgggcaatgtcgatttcatcgagaagcggcagggcatgttgtgtaaataataccagccattcgtggatcttctccgtccccattaactgagcatcttcattgagttggcttacatccaggctttgatcattattgacttgcagttggagatagtgcgccagtaactgaccgagcacttcacgcggcaccggtttagggataatcccgcggaataaactactggtacgctggcgcagcgtttcgtcaatgacatgggcgctaaagccaatcaaaaccaggctcggatattgctgtgccagttgtcgggcaagcgtaatgccgtcgatatccggcagatcaaaatccaccagtgcggcagcaaacggttcgctattttgcagtgtctctaaagcctgcgcggcattgccaacagcaacaatctgcgcaccactggttttcagcatctcaatggtaattcgctgggttagcgggttatcttcaattaacagcaaacgtaaaccgtcaagacgcaccgcctgattgactgtttttggcacgggtgccgtggcaacacgtaacggcaagcgtaaacaaaaacagcttccaacctccggcgtgctggtggcgctcagttcgccgcccatcgcctgggccagacggctactgatagtcagtcccagcccggtgccgccgcgtttgccgcttacctgcacaaatggctggaagatttctgccagtttcgcgggatcaataccgcagccgctgtcttccacttcgaccagccattgctcgccatcagtgcgactacgcaggataatgtacccttcgtcagtaaaacgcagggcgttgctcaacaggttggttataacctgacgaatacgtcgtggatcgcccattaacgcgcacggcatatcatcggcaattgccgttgccaggcgaatcgggcgacctttcacccgtccgctcattaattgcagggtactttccagcagcgggcgcggttcaaagggctcatcgctgacgctaacattcttgccacctgcttcgatagcggaataatcgagaatatcgttgaggatggtcagcaagctttcaccagagtcagtaattgcccgcaaatcatcacgctgggcgttaagtgcggggttatctgccagcagttgagcagtgccgagaataccgtacagcggtgtgcggatctcatggctcatcgccgccagaaacgcgctttttgcctggctggctttttctgcttccgcccgtgcctgtcggtgttctatcaccagttcctgcaattcagctgtacgcgctttgacctgcgccgccagctgttcgcggtggcgattcagtgcatgaacattgctgcgaaacgcatccatcagccgcccgatggtatccagctcccgtacgccagcggtttccgggaaaggggagtcaatatcaccgtccagcagccgttgcagcgcctgcgtttgttcggcaagtggacgcgtgacactgcgataaaccacgcgccagaggatcagaatcagtgcgcaaagactaaccatccccagcaataacaggctgtattgcccgcgtgcactcgctttttccagatgcgccagtccgtgctgattacgcagctcaatggtgtcgaccagctgactgacttcgctactaaactgcgcgaactgggcgatgttattttgtgcgagagtttgtaggtgattgctgatttcactgtcctgctgatacagcgccagcaaatcgctatattggctaacggtagttaacgttgttgcgacctgcgcacgaacacccggatcttcaatgcgtatttgccgacgttgcagaattttcaccgcattattgagctgcttttccagcgttggtgcatttttctggatctgctccagccccagattcatcaccatttgctgcacccgcagagcgctaaggcgcagttcattcatctggttaacatactcaagatcgatatcaatcagccgatcgagtgcactttcagcagcctgacgctgatcttgttcgatcaaatcgtaaatcccggcctgggtcgctccagcggaagttgtcgcattattcgcctgaccttgcgccaggcgtgcgatctcatcggcggcagcgactatctgctgactgagttgctgttgttgctggcgcagttgcaaacgctgccccaccagttccccttgctgacgtaagctacgggagatctcctgctcctgttgttcaatagcggtggtatcaaaaccttgttcccgtaacgcttgcagcaacgcattaatcttcaggctttgtgcggtgagcattcgcccctgcgcctgccacatcttttcgttatcggcactggtcaggttctgcgcggcgaaaagttcccaggcgctggcttcgctcaactggcgcgccatattcatggtaggaatcaatgcctgagtgttgtctttttccacctggctgataaagcgcaggttgtaccatcccaccagggtactggtcagggttaacagcgccatcagggcaaagcccatccagagtcttcgggtcagggttaaattcacggtcggtgcactttaggtgaaaaaggttgagtcgcaaagcggaatgcatctagcataaagccttattattgatgaggctatcatgcgcgtactgctatttttacttctttcccttttcatgttgccggcatttagcgctgataacctgttgcgctggcatgatgcgcagcatttcacggtgcaagcctctacgccgcttaaagccaaacgcgcatggaaactgtgcgcgctttatcccagcctgaaagatagttattggttaagcttgaactatggtatgcaggaggctgctcgccgctacggtgtggatttaaaagtgctggaggcaggcggctacagccagttggctacccagcaagcacaaatcgaccagtgtaaacagtggggcgcagaggccattttgctcggtagtagcacgaccagttttcccgacctgcaaaagcaggtagcaagtctgccggtgatcgaactggtaaatgctattgatgctccccaggtgaaaagccgcgttggtgtgccctggtttcagatgggctatcaaccggggcgatatctggtgcaatgggcgcacggtaaaccactgaatgtgctgttgatgcccggacccgataacgccgggggcagtaaggagatggtcgagggttttcgcgcagccattgccggaagcccggtgcgtattgttgatattgcgcttggtgataacgatattgaaatccagcgtaacctgttgcaggagatgctggaacgccatccagaaatcgacgtcgttgccggaacggccattgcggcagaggcggcaatgggggaagggcgtaacctgaaaacgccgcttaccgtggtgagcttttatcttagtcatcaggtgtatcgcgggctgaagcggggaagagtgattatggctgccagcgatcaaatggtctggcagggggaactggcggttgagcaggccatcaggcaattacaggggcaaagcgtttctgataatgtcagcccaccgattttagttctgacgccgaaaaatgccgaccgtgaacatattcgccgcagcctgagtccagggggatttcgtccggtctatttttatcagcacacaagtgcggctaagaaataatcagcacacatcagcggctaagaaataaccttcaccatgttgcgtcaccagtaaatccgcgctgagtttatgacgtaaacgacgaattaacacatcgacggtgcgcaggtcagggttttccacccgacgcgcagaaagcatacgtagcagacgttcacggctgagaatttcgcccggattcgtcacaaatgccaccaacatttcatactctgcgcgggtcagtttaatcggctcgccatcccgctccagcgtatggcggctcacattcaggcaataaccggcaaagcgatagcagttgtcctgagtgtgcggttgagcttgtcgcgcgaggtcgattcgccagagcagatttttcacccgtactaccagttcgcgcagttccagcggtttggtgacgtaatcgtctgcgcccatttccagcccaacaatacggtcaatccgatcgctgcgtccggtaaccagaataatccccaccgtactgcgttctcgcagggcgcgggttaacatcaggccattttcatcgggtaagttgatatccagcagaattaaatctacgctctgattctgcataatttcccgtagcccagcaccgctcgccgtaacggaaacggtatacccctcctgagtgaagtaggattgtaatcgcgcctgggtaaccggctcatcttcaacaataacaatgtgatgtggcatcagagggttttactcattctgttcatatctgttcatattctgccgtaagccgttcatcctgaccagtgccgctgttcatatttgctcattaagatcgcttcactaaaccataattctacaggggttattatgcggaaactctggaacgcgctacgccgacccagtgctcgttggagcgtactggcgctggtcgcaattgggattgtgattggcattgcgctgattgtattgccacacgttgggatcaaagtcaccagcacaaccgaattttgtgtcagttgccacagtatgcaaccggtgtatgaagaatataaacagagcgtgcatttccagaacgcctccggcgtgcgagctgaatgccatgactgtcatatcccgccggatattccaggcatggtgaagcgcaaactggaagcgagcaatgatatctaccagacctttattgctcactccattgatacacctgaaaaattcgaagccaaacgcgcggaacttgccgagcgtgaatgggcgcgaatgaaagaaaacaacagcgcaacctgccgctcctgccataactacgatgcgatggatcatgcgaagcagcatcctgaagcagcacgtcagatgaaggtggcagcgaaagataatcaatcctgcatcgactgtcataaaggtattgcccaccagttaccggatatgagtagcggcttccgtaagcagttcgatgagctgcgcgccagtgctaatgacagtggtgacacgctgtactctattgatattaagccaatttatgcggcgaaaggcgataaagaagcctctggttctctgctgcctgctagcgaagtgaaagtccttaaacgtgacggcgactggctgcaaattgaaattaccggctggacggaaagcgccggacgtcagcgtgtactcacccaattcccaggtaaacgcatctttgttgccagcattcgtggtgatgtgcagcagcaggtaaaaacgctggagaaaaccaccgttgccgacaccaataccgagtggagcaagttgcaggccactgcgtggatgaagaaaggcgacatggtgaacgatatcaaaccgatctgggcttatgcggatagcttgtacaacggcacctgtaaccagtgccacggcgcaccggaaatcgcccactttgacgctaacggttggatcggcacgctcaacggcatgattggctttaccagtctcgataaacgtgaagaacgcaccttgttgaaatatctgcaaatgaatgcgtctgacaccgcaggtaaggctcacggcgataagaaggaagaaaaataatgaacaataacgatctctttcaggcaagtcgtcggcgttttctggcacaactcggcggcttaaccgtcgccgggatgctggggccgagtttgttaacgccgcgacgtgcgactgcggcgcaagcggcgactgacgctgtcatcagcaaagagggcattcttaccgggagccactggggggctatccgcgcgacggtgaaggatggtcgctttgtggcggcaaaaccgttcgaactggataaatatccgagcaaaatgattgccggattgccggatcacgtacacaacgcggcgcgtattcgttatccgatggtacgcgtggactggctgcgtaagcgccatctcagcgatacctcccagcgcggtgataaccgttttgtgcgcgtgagctgggatgaagccctcgacatgttctatgaagaactggaacgcgtgcagaaaactcacgggccgagtgccttgctgaccgccagtggttggcaaagcacggggatgttccataacgctagcgggatgctggcgaaagctattgccttgcatggtaatagcgttggtacgggcggagattactctaccggtgctgcgcaggtgatcctgccgcgcgtagtcggtagcatggaagtgtatgaacagcaaacctcctggccgctggtattgcagaacagcaaaaccattgtgctgtggggctccgatttgctgaaaaaccagcaagcgaactggtggtgcccggatcacgatgtttatgaatattacgcgcagctaaaagcgaaagtcgccgccggtgaaattgaggtcatcagcatcgatccggttgtcacatccacccatgagtatctggggcgcgagcatgtgaagcacattgcggttaacccgcaaactgacgtgccgctgcaactggcgctggcacatacgctgtacagtgaaaacctgtacgacaaaaacttccttgctaactactgtgtgggttttgagcagttcctgccgtatctgctgggtgagaaagacggtcagccgaaagatgccgcatgggctgaaaaactgaccggcattgatgccgaaaccattcgtgggctggcgcggcagatggcggcgaacagaacgcaaattattgctggctggtgcgtgcagcgtatgcagcacggtgaacagtgggcgtggatgattgtggttctggcggcgatgctggggcaaattggcctgccaggtggtggttttggttttggctggcactacaacggcgcaggcacgccggggcgtaaaggcgttattctgagtggtttctccggctctacgagcattccgcctgttcacgacaacagtgactacaaaggctacagcagcactattccgattgcccgttttatcgatgcgatcctcgaaccggggaaagtgatcaactggaacggtaaaagcgtaaaactgccgccgctgaaaatgtgtatttttgccggaactaacccattccatcgccatcagcagatcaaccgcattattgaaggcttgcgcaagctggaaacggttatcgccatagataaccagtggaccagtacctgccgctttgccgatatcgtactgcctgcgaccacgcagtttgagcgtaacgatctcgaccagtacggcaatcactccaaccgtggcattatcgccatgaaacaggtggtgccgccgcagttcgaggcgcgcaacgacttcgatattttccgcgagctgtgccgtcgctttaatcgcgaagaagcctttaccgaagggctggacgaaatgggctggctgaaacgcatctggcaggaaggtgtacagcaaggcaaaggacgcggcgttcatctgccagcgtttgatgacttctggaataacaaagagtacgtcgagtttgaccatccgcagatgtttgttcgccaccaggcattccgcgaagatccggatctcgaaccgctgggcacgccgagtggcctgattgagatctacagcaaaactatcgccgatatgaactacgacgattgtcaggggcatccgatgtggtttgagaaaatcgaacgctcccacggtgggcctggcagccaaaagtatccgttgcatctgcaatctgtgcatccggatttccgacttcacagccagttatgtgagagcgaaacgctgcgtcagcaatatacggtagcgggtaaagagccagtattcattaacccgcaggatgccagcgcgcgcggtattcgtaacggtgatgtggtacgcgtctttaacgctcgcggtcaggtgttggcaggggcagtggtttctgaccgctatgcacccggcgtggcacgaattcacgaaggggcatggtacgatccagataaaggcggcgagcctggtgcgctgtgcaaatacggtaaccccaacgtgttgaccatcgacatcggtacaagccagctggcgcaggcgaccagtgcgcacactacgctggtggaaattgagaagtacaacggaacagtggagcaggtgacggcgtttaacggccccgtggagatggtggcgcagtgcgaatatgttcccgcgagccaggtgaaaagttgaattaacccgcgtcgcaggtgaaatcatgaccacgctgacagcacaacagattgcctgtgtttacgcctggctagcgcagttgttctcccgtgagctggacgatgaacaactgacgcaaatcgccagtgcgcagatggctgaatggtttagcttgctgaaaagcgaaccgccgctcactgcggcggtgaacgagctggaaaaccgtattgccacgctgacagtacgtgacgatgcccgtctggaactggccgcggacttttgcggcctgtttctgatgaccgacaaacaagcggcgctgccgtatgcaagcgcctacaaacaggacgagcaagagattaaacgcttgttagttgaggcagggatggaaaccagcggcaatttcaacgaaccggcagatcatctggcgatctatctcgaattgctcagccatctgcattttagcctgggagaggggaccgttcctgcgcgaagaatcgacagtttgcggcaaaaaacactgacggcgctgtggcaatggttaccagagtttgttgcgcgttgtcgtcagtatgacagctttggtttttacgcggcactaagccagttattgctggtgttagtggagtgcgaccaccaaaacagataacgtcgtttgtgcgcctgaaaagacgcgtttagcgtcgcatcaggcattatggcgcagttgccggatgcggcgtgaacgtcttatccggcccacaggaactgtaatctttgtagaccggttaagatgcgtcatcgcatccggcaaacacacatcacggatgagctacaaaccgggaaagccgctggcgcagcaggcggttttcctgcttcaggtgcgcaatatcatccattaacgtcagcgccaccgcgatccccggccagtccagagccagttcatgacgcaggcgtaccgcgcgttgcaccacaatggcggcatggtcgtcaaatacccaggttgtttcctggatctcacgcggttcaaccacccccaaaccgacaatttcattcaactcctcttcagagatgccggtatgcaggcaaaattcggtaatagtaaaagtcaccgtaacattagccattatgctttcccccaatctttacgtggatcaaaagagctctgggcgtctgccagttgctgccacagcgcggcagtgttttcatccggtttcggcggcatcacgattttcagtaccgcatacagatcgccggtctgttttttgctcaccagacctttgcctttaacgcgcaatcgttgcccggcctggctgcctggcgggatagtcagcaaaatgctttctttcagtgttggaacggtgactttagcacccagcgccgcttcccacgggctaaccggcaccacaatttccagatcctggccgacaatatcaaacagcggatgtggcgcaatatgaatcaccagccacaaatcgccatttggaccgccgttttcgcccggcgtcccctggcctttcagacggatgcgttgaccattgccgacgcccgccgggatcttcacattcagcgttttcggaatttcctgttcgatcatgccaaaggcgttataaaccggcaggttatagctgatggtacgcttatgctcagtaagcgtttcttcgaggaataccgccacttcgatttcaatatcgtggccgcgtgtggcggggcgttgacggctctggcgggcatgctgaccgaaaatactgctgaagatatcgtcaaaatcttcggcgttaaaactctgaccgtcgccatggtggaactgacggttaaattgcggatcgttgcgatgttgccacatctgatcatactcagcgcgacgttgttcatcacttaacacttcccaggcttcagcgacctctttgaagcgggcttcggcatccggttctttgctgacatcaggatggtatttgcgggcaagtcgacgataggcggtcttgattgtcttgagatcgtccgtcggtttcacgcccatgatggcgtaataatcctttaattccatagcgttatctcgcgtaaatcaacacaaattgaaggaacccctgtaaggtaactcctataagtgtagggtaatcctcaaaatttcatatgccaacacagaatatgttattgaaatcatcgcggagaggaggtcgccatcaagatgggttgctgaacatattttaaacaggtgaaaaagggtgagcgatttttgatagttgaaccaggcactttaagtttaactagggcgtcattatttattaaattttatagacgctatatatgggtagtaatatacatggaattagttgcactgcaaataattatttgaaacaggcctggaacgatataaaaaatgagtacgaaaaaaatcaaacatatagtatcacgctttttgaaaacacactggtgtgttttatgcggttatacaatgaactcagacgtaaagtaaatgaagaggatactccatgtctggaatgtgaaagtctagaaaaagaatttgaggaaatgcagaatgataatgatctaagtttatttatgagaatattgcgtactaatgatacacaaatttatagtggggttagtggaggtattacatatactatacaatatgttcgagatattgatattgttagagtgtccttgccgggcagagctagtgagtctatcacagattttaaaggttattattggtataactttatggagtatattgaaaacattaatgcgtgtgatgatgttttttctgagtattgttttgatgatgaaaatataagtgtccagccagagcggataaatacgccgggaatatctgatttggattctgacattgatttgtctggtatatcttttattcagcgtgaaactaaccaggcattaggattaaaatatgctcctgtagatggcgatggatattgtctgttaagagctatactggttttaaaacaacatgattatagttgggcgctggtcagttataagatgcaaaaggaagtttacaacgaattcattaaaatggttgataaaaaaacgatcgaggctcttgttgatacggcattctataatctcagggaagatgtaaagacgttatttggcgttgatctacaatctgacaaccaaattcaggggcagagtagtcttatgagttggagctttctgttttttaaaaaacaattcattgatagttgcttgaataacgaaaaatgtatcctgcatttacccgagtttatatttaatgataacaagaacttgcttgctttagataccgacacgagcgataggattaaagcggtgaagaattttcttgttgttcttagtgatagcatttgcagtttatttattgttaatagtaatgtggcaagtatctccttggggaatgaatcctttagtacagatgaagatcttgagtatggttatttaatgaacactggcaatcattatgacgtttacctccctcctgaactttttgctcaggcttacaagttaaacaataaggaaatgaatgcgcaactcgactatttaaatcgttatgcaatttaatggcaaaggcatatgctaaaaaccattgttattagtctcacacttttttattggtaaatattgtctctgtattggtaacgccgcagatattctgtttagccacaggtgcaattatcagcggcgtacgcgaggcaggggctaatcaggcatagtttgcgtcaaaccttgcctgtttttgaagatgtatatagaaaaacaggcgttcaacaagccattttgcgaacctgttcccggaaaaaagtcatatttctgtcacactctttagtgattgataacaaaagaggtgccaggaatgaacaaaacgctaatcgccgcagctgtggcagggatagttttactcgctagtaacgctcaggcacaaaccgtaccggaaggctatcagctacagcaagtgctcatgatgagccgccataacttacgtgcgccgctggcgaacaatggcagtgtgctggagcagagcacgccgaataaatggccagaatgggacgtccccggtgggcaactcaccaccaaaggtggcgtgctcgaagtgtatatgggccattacatgcgtgaatggctggcagagcaggggatggtgaaaagcggggaatgcccgccgccgtacaccgtttatgcctatgccaatagtctgcaacgtaccgttgcgaccgcacagttctttattaccggcgcattcccggggtgtgatattcctgtgcatcaccaggaaaaaatgggcactatggacccaacctttaacccggtgatcaccgatgattccgccgcattcagtgaacaggcggtggcggcaatggagaaagagctcagcaaactccagcttaccgacagctaccagctactggaaaaaatcgttaactataaagattcccctgcctgtaaagagaaacaacagtgtagcctggtggatggcaaaaatacctttagcgccaagtatcaacaagaaccaggtgtttccgggccgctgaaagtcggcaacagcctggtagatgcgtttactttgcaatattacgaaggttttccgatggatcaggtggcctggggagaaatcaaatctgaccagcagtggaaggtgttgagcaagcttaaaaacggctaccaggacagcctgtttaccagtccggaagtggcgcgcaatgttgcgaaaccgctggtcagttatatcgacaaagctctggtcaccgatcgcaccagcgcaccgaaaattacagtgttggttgggcacgactccaacattgcctctctgttaacggcgctggatttcaaaccgtatcagttgcatgaccagaacgaacgcacgccgattggcggcaaaatcgttttccagcgttggcatgacagcaaagccaatcgcgatttgatgaaaattgaatatgtgtatcagagtgcggaacagttacgtaatgccgatgcgttaaccctgcaggcacctgcgcagcgtgtgacgctggaattaagcggttgcccgatagacgctgatggtttctgcccgatggataagtttgatagcgtgttgaatgaagcggtgaaataacagaaaactcccccgcgagaagcgggggagtcgctggttaaacgtttttacgttcgatggtctgttcgccccaaaaaaggctatctttatcggtcttagcaaaggctttgactaacacttcatcactaccttcttcccaaatcttttccgccattttttcgtcgtacccggcgacttcgaaaatggcctcggctatttccgggctcgtattgcgcagagatgcccattcaccgacgtgatgagctttcgcttcttgagttggcatgcgtatcctcctgttgaagattagccgttaagtttaactgccagacctgcgacatattccccttgataacgagcaatagacagttcttcctggctgggctggcgactaccgtcaccgcctgcgatggtggttgcgccgtacggcgtaccgccgcgaacctgactaacgtcaaataattcctgcgctgcgtagccaatagggacaattaccatgccgtgatgcgcaagggtcgtccaggtggatgtgatggtttgttcctgaccgccgccagtaccggtggaactaaagacgctcgccagttttccgtatagtgcgccggaagcccacaggccgcccgtctggtcgaggaaggtacgcatttgaccggacatgttgccaaagcgggtaggtgtaccaaaaataatggcgtcgtaatcggccagttcttgcggggttgcaaccggtgcagtttgcgttttaccgcctgctttttcaaataattgcggcggcatggtttccggtacacgcttaacgacaacttcagcgccatccactttgcttgcaccctcagcgactgcgcgtgccatcgtttcaatatgtccgtacatggaataataaagcaccagaactttagccatttctaaccactcctcgtgttatctctattccgtagcgattcgctaccacttatttaaagataagacgtccttttcagagtgcaaatttcacaaccacttatttgatttataacaactttcacaagcacgtaattttgtcgcaaaatgacacatttttatctcatcgcgtttttttaatcataagagcggcttatggataattattggagatgatatctattctcgctaagaagctgttgcaggatattaccaaacgcgggtctgcccgcgtcagttcactaagcttagtcccacgtagcgaaaatatggcagccgccatacgccgcgttaattctatgcaatatgatgtctatacccagacggaggtcagtaatggcaaaccatcgaggcggttccggcaattttgcagaagaccgcgaaagagcaagtgaagcaggtaaaaaaggtggacagcacagcgggggtaatttcaagaatgacccgcagcgcgcatctgaagcaggtaaaaaaggtggtaagagcagtcacggcaaaagcgacaactaaccgggctaatcaatgacgaatgcatttttgtctgtagctcgtcaaaaagccatcaccgccggttacccggtggttgatactgatgacaaatgtaagcttgcctgatgcgcgatgcttatcaggcctaccagaagattgcaatatattgaatttgcactgttttgtaggccggataaggcgtttacgccgcatccggcatgaacaatgcgtacgttgtcaacaatctgcaccgccggtaaccccggcggttttctgtttatggctcctgatgaacaacttctggcggtggaacgtcaaccaactttctgcttaacaacgcattgagtaaaatcgcgccaaaggttgctgtaccaatccctcccaacgtaaaaccgcccagcgtgagagcaaaatcacccgcgcccagcactaaggttactgcgaccataatcaaattaccgttctggcttaaatcgacacggttttgtacccatatccttgcgcctgcgacggcaatcagcccgaacacaacaatacttgcaccaccaataaccgcggccggaatggtatgaatcagcgcaccaaatttcggactaaagcccaacagcatggcgatgacggcagcagcaacaaacaccagcgtgctgtagactttggtcacggccatcacaccgatattttcagcataggtggtcacgccgctaccgccgacagagccggaaagcatcgttgccagaccatcgcctacgaatgcccgccccatatacgggtccatattgcgtccggtcatcccggcgactgccttgagatgacctaagttttccgccaccagaatcaccgccacgggcgcaatcagcatcattgcctgaccattaaaagcaggagtggaaaaatgtggcagaccgaaccaggcagcatggctgacgagagtaaaatcgacggcttttcccagccctaaaacgttggtcatcacgccatacagcagacaggcgacaattaatcctacgagaatcaataaccgctggatcatgccacgggtaaacaccgccaccagcccaatacacagcaccgtcattaccgccatccagctatcaaaggcgctagcgcttacacttttcactgcgataggcgctaagttcaggccaatcgccatcaccaccgcacccgtcaccaccggcggcatcagtcgttcaatccagcgcgtaccgattttcatcaccaccaggccaatgacggtataaaccagcccacaggcgataatcccgcccagcgcaatgctgatattcgggttaatgccctgaccgttaaagcccgtcgcggcgatcaccacgccgacaaaagccgcgctggagccgagataactggggacgcgcccgccggtaataaagaaaaacagtaacgtgccgatcccgctcattaaaatggaaagattgggatccagccccatcagaatcggcattaacaccgtcgcgccaaacatcgccaccgcgtgttgaacgcccattactgccgtctgagcaaacggcaatcgttcatccggcgcgaccacgccgctctctgtagaggtgctttttaactgccagtgaggaaaaccgaacattgccatcagctgtctccttaaggaggttaacaagcagggcgcatcagcgcgtgataactgcgatcgaaccacaccagcccgtagggtgtggtgtgacgatgaatcgcttcgatggcgcaaaacagaatgtcgtgggtgccgacgctcaccacctggctgatacggcagtcaaagctaaccagagcctcttccagttgcgggcatccggtcacccccgtctgccagcgggcggcggcaaagcggtgttccatgggcgttttgccgccaaaaaggttactaagcggctcctgcccggcgctaagtgtatttacacacagcgttcgattttcattgaatgccggccagacggacgccccacgattcaggcacaccagtaatgtgggcggcgtatcggtcacactgcagacggcgctggcggtgaacccggcgcgcccggctggaccgtccgtggtgataatattgaccgccgcgcccatgcaggacatcgcatcgcgaaaagtttgttgatcgacaatgttcatagtttgctccttacaacagcccgcaggcttcttcaaaggacagacgtggcaggcgcgcataaagcttgctgctatcgccatagccgatattaatcagcagattgctcttcagcgtgctgcccgtaaaaaaggcgtcgtccacgtgttgacggtcaaagccgctcatcgggccggtatccagtcccagcgcccggcaggcgacgatcagataggccgcctgcatggaactgttgcgaaacgctgtttcttcggcaagttgtgggctggaggtaaaccaactgcgggcatcaccgtggggaaacagtagtggtaaccgttcataaaattcactgtcccaggcgacgatagcggtgacgggcgcggtcagggttttttgcagattgccgctggaaagtgccgggcgcagacgttcttttccttctgccgtgcgggtaaacacgatccgtgccggagaacagttagcacttgtcggcccccatttcatcagggcataaatctcccgtaacgtctcatcgctgacgggtgtctcccgccagccgttgtgagtgcgggcatcggtgaacagggtgctaagcgcacctgggctaacggcttcgttcatagcaattccttacagggcggcttcacggtgatgtaacaggctggcaagcccgttgagtaacagagcattaaacgtttcgggatcggtcacgttgcaggcgtgtccgccatagggcatcaccattttctggctatcgggcagggcggcatgaagttcactggaacatgctgttggcaccagcagatcatcactggcgcagatgatttgcaccgggcagcggatgcgatccgcatggtgactaaagtcagcgcgtttgagggcgttaagtcgacgcagtaaattatttttgccctgaaaatgcgccagtgccagcgcgtcttctgcctccaggcgaggtgcgcgggccgccatccagtcggcgggatagaggaacaacggctgcgcttccacccatgcctgcgcgccgccgctatacagtaatcgttcgcgaacctgaaaacagcggcgcgtatgggcgtttattcgtagccagccgttaacgctgatcagcacagttacgctcgcgggataatccagcgccagctgcattcccaccagcgcaccgagcgcatggccgaccactgcgtaatgctcaatccctgcggctaccagcgcctgatgcagttccgctgccatctgggcgatactgtaatcttctgccagcgtgtcgggattattgccggtgccgcgctggtcgtaacagactacctgatactcctgctccagcaccgccagttgcggtaaccagtaactgccgctacccccaagaccgctaatcaacaccactacgggcgcatcagcataagggggaggactgagactaagtttcatcgcggcctcacttggcgatatgcgcaattgtggcgatttccaccagcgcgtcaggttttaccagtccgcactgaatgcagaatcgcgccggtttatcacccggaaaaaactcggcgtagatttcgttaatcgcggcgtaatttttccagtcggtaataaagatgctgttgaaggtcacatccgccatcgtgccacccgccgtctcgatcaccttgcggatagtttccagaacgtggcgggtttgcgcctttgggtcatcggcaaacagcacgttattatgttgatcaaaagccagcgtaccggagacatacaccacgccatcagccagcgtgccgggaacgaagggggccagcggtgcgctgctgccagcgggaataattacggattttggcatcgttaaactccttaagcgatatgagcaaaggacgtgggagaaagcgcgtcgcagaatgtttcgacgtcgctgacccagccaaaaaaggtttcgatattgaacaacgcggctttctgcgcaaatttcggccccgcctggtgagttgcgtcttcaagcaccacgccgaaatactccagaaaaaagccgtcgcgtagcgtgctttcgacgcagacgttggtagcgatgccggtgaaaaccagatggcgtattccgcggctgcgcaaaatgctgtccagcggcgtattgaagaaaccgctgtagcgcggcttcggcagcacaatatcgccaggctgcggcaccagttcatccaccagttgataatcccaggagcctttcgccagcaatttcccctgcagctgcggctgcttacgcatggttttcagggcgttgcttttatgaaaattcggactgccgggtccgccagcctcgacatactgttcatcccagccattttgaaaccagatgatcagcatccctgccgctcgcgctgcggtcacggcggtttgaatgttggcaatgaccgggcgagtggtactgacatcaaacccggcgagatctaagtagccgcctggcgtggcataagcgttttgcatatccaccacgatcagcgcactttgctgcggatcgaaggtaatggcttccggtcgagcggttaaggtcgtcatcatgccacctcctgagtcagcgcaggtagatgggcgcggcattgcatcagtggttgaatgcgctcgccgaaggtttcgattccgctcagaaaatcgtcgaaggttaacagcacgccttcggcaccaggcacgcttgcgacttcatctaacatgcgcgcgacactggcgtaagaaccgactaacgtccccatattgatgtttaccgcgctagtgggatcggccatctgacgaacgttggtgtcagtaccggagcgggtatctttctgactttgttcggttagccagcttaacgcctcttcatccgcgcccgctttgtagtgttcccatttggcgcgagcggcatcgtcggtttcatcggcaatcaccataaacaacacataagagccaacgtcgcgtccggtttgctctgcggcctgtttcatccgcgcagcggtcggggcgaaagccgtgggtgtatttacgcctttgccgaaacagaagttgaaatcggcataccgggcggagaacgccatgccagcgtcgctttgcccggcgcagatcactttcatggggacactcggttgcggactcacgcgacaatcattcatggtgaaaaaatcgcctttaaaatcgcttttccccgtgccccacaggtcgcgcagcacctgaacatattcggtgagatagtcgtaacgacgggagaaatagtcatcgccaggccagatacccatctgctcatactcgggcttttgccagccagtcacgaggttgacgccaaaacgcccgccagagatggagtcgatggttgcggccatacgggcgacgattgccggaggtaacgttaaggtggcagcagtggcgtaaatctgaatgcggctggtcacggccgccagccccgccatcaaggtgaagctctcaaggttgtgatcccagaactcagttttgccgccaaagccacgcagtttgatcatgctcagggcgaaatcgaaatggtagtgctccgctttttgcacaatggctttattcagttcaaaggtcggcatgtactgcggcgcgtgggtgctaatgagccagccgttgttgccaataggtacgaatacgccaattttcatcatcaacctctcttcgtctcgtaaagtgaaagtcagacggggcgctgcatcctgcatatccttttcagccgcgtattggcttgtttgcaaagcggatgccagtttttaaaaagttaatgttattaatctgttaacattacgttatctaaaatatctggtaaaaagtggactaaacggtcaaaacagttgcacataaaacatgcatctgtgcgcgatgagagtgcagaaggtcgaggccgggcgggggttttgctatcctgttgccaatctacaagaggggagagcgcatgacgcaaggcgcagtgaaaacaacgggtaaacgtagccgcgcagtaagcgcgaagaaaaaagcgattcttagcgcagcactggacacttttagtcaattcggttttcacggcacaaggctggagcagatcgcagagttggcgggtgttagtaaaaccaatctgctgtattactttccgagtaaagaggcgctgtatattgccgtgctgcggcagattctcgatatctggctggcaccgttaaaagcgtttcgtgaagatttcgccccgctggcggcgatcaaagagtacatccgtctgaagctggaagtcagtcgcgattatccgcaggctagccgcctgttctgtatggagatgctggcaggcgcgccgctgttaatggatgaactgacgggcgatttgaaggcattaattgatgagaaaagcgcgctgattgccggttgggtcaaaagcggcaaactcgcgccgattgatccgcagcatttgatttttatgatttgggcttccactcaacattacgccgatttcgcccctcaggtggaggcggtgacaggcgcgacgttgcgcgatgaggtatttttcaatcaaacggttgaaaacgtgcagcggattattattgaggggattcgaccacgttaaagatgccggaggaggttgtaacatcctccggctacctgtttaacctatagtcattaagctggcgttaccgccagcggcagcggtattcacactcaggctacgctcgatatacagccgttccagaaggatattgctttcgccacgggcaaaaccctgcacgctaacaattgtgccatcccgcgcggcaactgcttcacacaatgcgcgaagctgatcgctatcaccgtggaagatcaccgcatcaaacggttgagcggttatattttccgctttcgccagttgaatacgttcgctgactgcgcttggcaatgccttcactaactgacgatgcagcgcgtcatccggccacagtacctggctgcccaccgccagcacggcggcgagctgagtcagcgcatcctgctcatcatcggcaatacacaacacgcgctcacgcggcagcagcgtccaggtgttgcgttcacccgtcggccccggcagcaatcgttgtgttcctgcctgcgccagctcgccatattgcgtacataacgcctgcaattctggacgatttgctgcccattcccgcagtgcatttagcggctgagtcaatgcggctttcaactgcgcatcgaccggatactttgcatcctgacgcgcgagcgtcactgccagcgcactttccgggcgattcgccagcagacggtagagatagagcggaccgcctgctttcggcccggtaccggacaacccttcgccgccgaacggctgcacaccaaccactgcgcccaccatattacggttaacatacaggttaccaacatgggcgctgccagtgacctgggcgatggtttcatcaatgcgcgtatggacgccaagcgtcagaccataaccggaagcgttaatctgctcgatcagctctggtagctggttacggttgtaacgcaccacatgcagcaccggaccaaagacctctttttgcaattcggcaaagtcatccagttcgatcagcgtcggggcgacaaaggtgccgctttgccattcacgggcatcttcgctgttttcccgcaccgcctggaacaccggacggcctttgctacgcatggtctgaatatggcgctcaatattggctttcgcttcgctatcaatcactggaccgatatcggtggtcaggcgacccggattacccatccggcattcggccattgcgccgcgcagcattttcaacgtgtggtcggcaatctcatcttgcaggcacagcacgcgcagcgcgctacaacgctgacccgcactgtcgaacgcgctggccagtacatccacgacgacctgttcggtcagtgcactagaatcgacaatcatcgcgttcatgccgccggtttcagcgatgagcggaatagggcgaccctgagcgtccaggcggctggcgatattgcgctgcagtaacgtagcgacttcggtactaccggtaaacatcaccccgcgcacgcgatcatcacccgtcagttgcgcgcccacggtttcaccccgacctggcagcaattgcaccacgcctggcggtacacccgcttccagcaaaatggcgatcccttgcgcggcaatcagcggcgtttgttctgccggttttgccagcacgctgttacctgccgccagtgcggcggcgatctgcccggtgaaaatagccagcgggaagttccacggactgatacacaccacaggccctaatggacggtgggtttcgttagcgaaatcatcccgcacctgtccggcgtagtagtggagaaaatcgaccgcttcgcgcacttcggcaatggcgttactgaaggtttttccggcctcacgcaccagaataccaatcagttgctgcatctggctttccatcagcacggcagcgcggtgcaaaatcgctgcgcgttcagccggaggcgtggcaaaccagattggcgcgttattaaccgcactttccagcgcctgttctacttcacgcggcgtggcttcacgcacatagcccacaatatctttcggttccgcagggttaataacggggctcatctcacctgccgctaccggttgttccagcattggcaaggcctgccatttttgcagtgcactattgagcagggcagaggagaggctggccaggcggtgttcgttagcgagatccagccctgcgctgttgtcgcgcccgtgaccgtaaagatcgcgcggcaggggaattttcggatgcggtaatccagtttgcccttcctgttgcgccagtttttctacagcagtgaccggatcggcgaccagttcatccagtggcaaagaggtgtcggcaatacggttaacaaagctggtgttagcaccgttttccagcaggcgacgcaccagatacgccaacagcgtttcatgtgtgccaaccggagcataaatacgacacggacggttaagtttgccgtcggcaactttcccggggacctgctcatacagtggctcgcccataccatgcaggcactggaactcgtactgacccgggtagtagttctgccccgccagttgataaatcgccgccagcgtatgggcgttgtgcgtcgcgaactgcgggtagattagattcggcaccgccagcagctttttcgcacaggcgagataagaaacgtcggtatacaccttgcgggtataaaccggataaccttcaaggccgtccatctgcgcacgcttaatttcactatcccagtacgcgcctttcaccaggcgaatcatcagacggcgacggctgcgggtggcgagatcaatcaggtaatcgatcaccaacgggcagcgtttttgataagcctgaataacaaaaccgatgccgttccagcctgccagttccggctcgaaacagagtttttccagcagatcgagggagatctccaggcgatcggactcttcggcgtcaatgttgataccaatatcgtactgacgcgccagcagggtgagacttttcagacgcgggtaaagctcttccattacccggtcatactgggcgcggctataacgcggatgcagcgcgctcagtttgatactaatgcccggcccttcatagatgccacgaccgttagacgctttaccgatggcgtgaatcgcctgctgataggaaaccatatacgcctgtgcatctgcggcggtcagcgcggcttcgcccagcatatcgtaagagtaacggaaacctttctcttccagcttgcgggcattggctaacgcttccgcgatggtttcgccagtgacgaactgctcacccatcaggcgcatcgccatatccacacctttgcggatcagcggttcaccgcttttaccgataatgcggttcaggctgcgggagaggctggcttcgttatgggtggaaaccagtttgccagtaaacagcagcccccaggtggcggcattaacaaacagactcgggctacgaccaatgtgactctgccagttaccgttgctgattttgtcgcgaattaacgcgtcgcgggtggctttgtcgggaatacgcaacaacgcttccgccagacacatcagcgccacgccttcctggctactcaggctaaactcctgcaataacccctggaccatacctgcgcgaccactggcatttttttgattacgcagtttatcggccagctgatacgccagtttgtgcgcctgttcagcaactggctgcggcaggcgggcttgttccagcagcatagaaaccgcttcggtttccgggcggcgataggccgcggtgatcgcggcgcgggaaacgctctggggcaatatttgctcggcaaagtcgaggaatggctggtgtggttcctctgccggagtcggtgcttcatcgctctcattggccgcgccagaaagcagcgcaggtagctccggcagagtatcgctgttttccagttgttcgagataagaaaaaatcgcctgcttaattaaccagtgtggtgtgcgatcgatacgtgtcgcggcagacttaatacgctcacgcgtcgcgtcgtccagcttaacccccatggtggtggttcccatgccattactcctgttgttcagaaaggtgcaacttaacgttatcgtgaaatatccatgatgttgcaactttgtgcaaccatgttaaatgtgacatgcgtagcaagcttaaaaatgaatgaaatgttaataaaagaaatcgatatgacagggattaaaaaaataactcagactttttctctgcggcagttaacatttttgaaaggtgcaaccgcaaaaaatgtgagagagtgcaacctgatgaaaaatagtgtcgctgagcactaaaatttaatgtaaatggtgtgttaaatcgattgtgaataaccagcgcttccggcaggatacggtcgccctggtaaaacataaactctgttaccccgttccggtggcagatataacggcaagtttcgacattgccgataataattttttggagactttagatggctattagcacaccgatgttggtgacattttgtgtctatatctttggcatgatattgattgggtttatcgcctggcgaagtacgaaaaactttgacgactatattctgggcggtcgtagtcttgggccattcgtgacggcattaagcgcgggtgcgagcgatatgagcggctggctgttaatggggttgccgggcgctgtttttctttccgggatttccgaaagctggatcgccattggcctgacattaggcgcgtggattaactggaagctggtggccgggcggttgcgtgtgcataccgaatacaacaataacgccttaacactgccggattatttcaccgggcgctttgaagataaaagccgcattttgcgcattatctctgcgctggttattttgctgttcttcaccatttattgcgctagcggcattgtggcaggcgcgcgtctgtttgaaagtacctttggcatgagctacgaaacggctctgtgggcgggcgctgcggcgacgatcctttacacctttattggcggtttcctcgcggtgagctggactgacactgtacaggccagcctgatgatttttgccctgatcctgacgccggttatcgtcattatcagtgtcggtggctttggtgacagcctggaagtgatcaaacaaaagagcatcgaaaacgttgatatgctcaaaggtctgaactttgttgccattatcagtctgatgggttgggggctgggttacttcgggcagccgcacattctggcgcgttttatggcggcggattctcaccacagcattgtccatgcgcgtcgtattagtatgacctggatgatcctctgcctggcaggggcggtggctgtcggcttctttgggattgcttactttaacgatcatccggcgttggctggtgcggtaaatcagaacgccgagcgtgtgtttatcgaactggcgcaaattctgtttaacccgtggattgccgggattctgctgagcgcaattctggcggcggtaatgagtaccttaagttgccagctgctggtgtgctccagtgcgattaccgaagatttgtacaaagcgtttctgcgtaaacatgccagccagaaagagctggtgtgggtagggcgtgtgatggtgctggtggtggcgctggtggcgattgcgctggcggcaaacccggaaaaccgcgtgctgggcttagtgagctacgcgtgggcaggctttggcgcggcgtttggtccagtggtgctgttcagcgtgatgtggagtcgcatgacgcgtaacggtgcgctggcggggatgatcatcggtgcgctgacggttatcgtctggaaacagttcggctggctgggactgtacgaaattattccgggctttatcttcggcagtattgggattgtagtgtttagtttgctgggtaaagcgccgagtgcggcgatgcaaaaacgctttgccgaggccgatgcgcactatcatagcgctccgccgagtcggttgcaggaaagctaagggacttagcctgcggcggttttgtttggcttcagcagcgggttgcgctcccttaatgtgcctcgccatataaattgaatggtgcagggagcgcgcagggggcggccaatcgccgccgccccctgctgtcccggccttcggggaacgcttcagcgattttgacgccaccaacacccgagctgttattatgttccgggcaaaaagttagatttgataatcgcggatggacgaaattgcttgatacacccgcttatcagttttacatggaagctctgatgcattgagtctggacagttttgtcggctggatacggcgtttacgcggcatccggcaagaacacatggttctttgcaaacaatcccatctttctaccctggaataatcgtttatatcccttggcattacctctctttgtttacattccaacatcattttataaacattccgcttgtgtttttctttgccgtaatgataatcgctatcactgcgatttacttttctttgcatagattgactcagaaaaacgtttaagggtgggtggcatgtttgttccgtttctcattatgttgcgcgaaggacttgaagccgcgctgattgtcagtttgattgccagctatcttaagcgtacccagcgaggccgatggattgtgtgatgtggattggcgtgttgcttgccgctgcgttgtgcctgggcttgggtatcttcattaacgaaaccaccggcgaatttccgcaaaaagaacaggaactgtttgaaggtatcgtggcggtgatcgccgtggtgatccttacctggatggttttctggatgcgcaaagtgtcgcgcaacgtcaaagtgcaactggaacaggcagtcgatagcgcattgcagcgtggaaatcatcatggctgggcgctggtgatgatggtcttttttgccgttgcaagggaagggctggagtcggtctttttcctgctggcggcatttcaacaagatgtcgggatctggccgccgctgggtgcaatgctcggtcttgctactgccgtggtgctaggcttcctgctctactggggcggtattcgcctcaatcttggtgcattttttaaatggaccagcctgtttattctcttcgtcgccgcagggctggcagctggtgccattcgcgcatttcatgaagccggattgtggaaccactttcaggaaatcgccttcgatatgagtgcggtgctctcaactcactcgctgtttggcacgctgatggaagggatttttggctatcaggaagcgccgagcgtcagcgaagtcgccgtctggtttatttatctcatcccggcgctggtggcatttgctctgccaccacgcgcaggggcgacagcgtctcgctccgcgtaacaaatacgacgcaaactcttgcttagttacaacatactttaaagggatagtctcgtcatgaccattaacttccgccgtaacgcattgcagttgagcgtggctgcgctgttttcttctgcttttatggctaacgccgctgatgtgccgcaggtcaaagtgaccgtgacggataagcagtgcgaaccgatgaccattacggttaacgccgggaaaacacagttcattattcagaaccacagccagaaggcgctggagtgggagatcctcaaaggcgtgatggtggtggaagagcgggaaaatatcgcccctggctttagccagaaaatgacggcgaatttacagcctggcgaatacgatatgacctgcggtctgctgactaacccgaaagggaagttgatcgtcaaaggtgaggcaacggcggatgcggcgcaaagtgatgcgctgttaagtcttggtggtgcaattactgcatataaagcgtatgtcatggcggaaaccacgcagctggtgaccgacaccaaagcctttaccgacgcgattaaagcaggcgatatcgaaaaagcgaaagcactgtatgcaccgacgcgccagcactatgagcgtattgaaccgattgctgaactgttctccgatctggatggcagcattgacgcccgtgaagatgattacgagcaaaaagccgccgacccaaaattcactggtttccaccgtctggaaaaagcattgtttggcgacaacaccaccaaagggatggatcagtacgctgagcagctttataccgatgtggtcgatttgcaaaaacgcatcagtgaactggctttcccacctagtaaagtggtcggcggcgcagccggactgattgaggaagtggcagccagcaaaattagcggtgaagaagatcgctacagccacaccgatctgtgggatttccaggctaacgttgaaggcagccagaaaattgtcgatttgctgcgtccacaactgcaaaaagccaacccggaactgctggcaaaagtcgatgccaactttaaaaaggtcgataccattctggcgaaataccgtactaaagacggttttgaaacctacgacaaattgaccgatgccgaccggaatgcactgaaaggaccgattactgcgctggcggaagatctggcgcaacttcgcggtgtgctgggactggattaagcgttatgcagtataaagatgaaaacggcgtgaatgaaccgagtcgccgacgtttactgaaagtgataggtgcactggcgctggcgggaagttgtccggtcgctcatgcacaaaaaacgcaaagtgcgccgggtacgcttagtccggatgctcgcaatgagaaacagccgttttatggtgagcatcaggcagggatcctgacgccacaacaggccgcaatgatgctggtggcgtttgatgtgcttgccagcgataaagccgatcttgagcggttgtttcgcttgttgactcagcgttttgcttttctgactcagggcggagcagcaccagaaacgccaaatccgcgcctgccaccactcgattccggcattcttggcggctacattgcgcccgataatctcaccatcacgttaagcgtgggtcacagtttgtttgatgagcgctttggccttgcgccacagatgccaaaaaagctgcagaagatgacgcgtttccccaacgacagcctggatgcggcgttatgtcatggtgatgtgttgctacagatttgcgccaacacccaggacacggttatccatgcgctgcgcgatatcatcaaacacacgccggatttgctcagtgtgcgctggaagcgggaagggtttatttccgatcacgcggcgcgtagtaaaggcaaagagacgccgattaatttgctgggtttcaaagacggcactgccaatcccgatagccagaatgataagttgatgcaaaaagtggtgtgggtaacggcagatcagcaggagcctgcgtggacaatcggtggcagctatcaggcagtacgcttgattcagtttcgagtggaattttgggacagaacgccgctgaaagaacagcagacgatttttggccgtgataagcaaaccggtgcgccgctgggaatgcagcatgagcatgatgtgcctgattacgccagcgacccggaagggaaggtgatcgcgctggacagccatatccggctggcgaatccccgcacggcggagagtgagtccagcctgatgctgcgtcgtggctacagttatagtctgggcgtcaccaactccgggcaactggatatggggttgctgtttgtctgctaccaacacgatctggaaaaaggcttcctgacagtacaaaaaaggctcaatggcgaagcgctggaggaatacgttaaacctatcggcggcggttatttttttgcgctgccgggggtgaaggacgcgaacgattatttcggaagcgcgttattgcgggtttaatgtttttaggcggataaggcatttgtgcgcagatgcctgatgcgacgcttgcgcgtcttatcatgcctacaatcagtgcgggtttggtaggctggataaggcgttcacgccgcatccggcgatcgtgcactgatgcctgatgcaaatcctgctgaaagcacacagcttttttcatcactgtcatcactctgtcatctttccagtagaaactaatgtcactgaaatggtgttttatagttaaatataagtaaatatattgttgcaataaatgcgagatctgttgtacttattaagtagcagcggaagttcccggcagtgatagtcagtcactatggagatcgcggatggtaacgtcctgtactggacatgttttagataatcaacgcgccaccactcgcggagttttctcctccggtagtcatctcgtcactttgcattttcaacctcatcctttctttagttgtgttaccgacgccgtaaacggtgcgcgtagccgttttagcgcattttatccaaaagcaaactatggcttacaaggaagccaaccctctgatgttcgtgcgcataatcgcgctgccaacggcgcgtgtgatgaatacaaacaactcaaggtgctctccatgggaagacaaaaagcagtgatcaaagctcgtcgcgaggcaaaacgtgtgctgagacgggatagccgcagccataagcagcgtgaagaagaaagcgtcaccagccttgtgcagatgggcggcgtagaagccattggtatggcccgcgacagtcgcgatactagccccatcctcgcgcgaaatgaagcgcaattgcactatctgaaggctattgagagtaagcagctgatattcgccacgggcgaagccgggtgcggaaaaacctggatcagcgcagcaaaagcggcagaggccctgatacataaggatgtcgacaggattatcgtcacccgtccagttctgcaagccgatgaagatcttggcttcttacctggagatatcgcagaaaagtttgctccctattttcgcccggtctacgacgtgctggtccggcgcttaggggcttcctttatgcagtactgcctgcgaccggaaatagggaaggtggaaattgcgccgttcgcctatatgcgtggacgtacctttgaaaatgcagtcgtcattcttgacgaggcgcagaatgtgactgccgcgcaaatgaaaatgtttttaacccgcctcggggagaacgtgacggttatcgtcaacggtgatatcacgcaatgcgatttgcctcgcggcgtgtgctccggattaagtgacgcgctggaacgtttcgaagaagatgaaatggttgggatcgtccggttcggtaaagaggactgcgtacgtagcgcactttgccaacgtacgctgcatgcctacagttaagtgtgttatcggtgcagagcccgggcgaaccgggctttgttttgggtgttcccggtgtgtgcaatatacgaaaaaaaagcccgtactttcgtacgagctcttctttaaatatggcggtgagggggggattgactcgcttcgctcgccctgcgggcagcccgctcactgcgttcacggtctgtccaactggctgtcgccagttgtcgaaccccggtcggggcttctcatccccccggtgtgtgcaatatacgaaaaaaaagcccgtactttcgtacgagctcttctttaaatatggcggtgagggggggattcgaacccccgatacgttgccgtatacacactttccaggcgtgctccttcagccactcggacacctcaccaaattgtcgttcctgtcttgctggaacgggcgctaatttagggaaatcatgacctgaggtcaacaaactttttgaaaaaatcgcgcgtttattcaaacttcaatcaatgtgtggttttaataagcgaaatctgctttttttgccaccgaccacggatttgttatgctggtggcctttgtagatcataacgataagtgcgaataaatttcgcacaacgcttttcgggagtcagtatggatatcatcttttatcacccaacgttcgatacccaatggtggattgaggcactgcgcaaagctattcctcaggcaagagtcagagcatggaaaagcggagataatgactctgctgattatgctttagtctggcatcctcctgttgaaatgctggcagggcgcgatcttaaagcggtgttcgcactcggggccggtgttgattctattttgagcaagctacaggcacaccctgaaatgctgaacccttctgttccactttttcgcctggaagataccggtatgggcgagcaaatgcaggaatatgctgtcagtcaggtgctgcattggtttcgacgttttgacgattatcgcatccagcaaaatagtagccattggcaaccgctgcctgaatatcatcgggaagattttaccatcggcattttgggcgcaggcgtactgggcagtaaagttgctcagagtctgcaaacctggcgctttccgctgcgttgctggagtcgaacccgtaaaagctggcctggcgtgcaaagctttgccggacgggaagaactgtctgcatttctgagccaatgtcgggtattgattaatttgttaccgaatacccctgaaaccgtcggcattattaatcaacaattactcgaaaaattaccggatggcgcgtatctcctcaacctggcgcgtggtgttcatgttgtggaagatgacctgctcgcggcgctggatagcggcaaagttaaaggcgcaatgttggatgtttttaatcgtgaacccttaccgcctgaaagtccgctctggcaacatccacgcgtgacgataacaccacatgtcgccgcgattacccgtcccgctgaagctgtggagtacatttctcgcaccattgcccagctcgaaaaaggggagagggtctgcgggcaagtcgaccgcgcacgcggctactaataaagcatcaggattcctgctatccttggcgggaattgaatacaggagagagttatgtatcccgtcgaccttcatatgcataccgttgccagcacacatgcatatagcacattaagtgattacattgcccaggccaaacaaaagggcattaaactttttgcgatcaccgatcatggcccggatatggaagatgcgccgcatcactggcacttcattaacatgcgtatctggccgcgagtggttgatggggtagggatcctgcgcggcatcgaagctaacattaaaaatgttgatggtgaaattgactgcagcggtaaaatgtttgacagcctggatctaattattgccggttttcatgagccggtttttgcgccacatgataaagcgaccaatacacaagcgatgatcgccactatcgccagcggcaatgtgcatataataagccatcccggaaatcccaaatatgaaatagatgtgaaagccgttgctgaagcagccgcgaaacatcaggtggcgctggaaatcaataattccagttttttacacagtcgtaagggcagtgaagacaactgtcgtgaggtagccgcagcggtacgtgatgctggaggttgggtggcattaggcagcgattctcacaccgcgtttaccatgggggaatttgaagagtgtcttaaaatcctcgacgcggtagattttccgccagagcgcattttgaatgtttctccgcgccgcttactgaacttccttgaatctcgcggtatggcaccgattgcggaatttgcagacctttaattactagtaatggaaatatattaatgaacgagttttctatcctctgtcgtgtgctgggtagcctctattaccgccaaccacaagatcctttactggtgccgctgtttaccctgattcgtgaggggaaactggctgcgaactggccactggagcaggatgagttgctgacacgtttgcagaaaagctgtgatatgacgcaagtctctgccgattacaatgcgttgtttatcggcgatgaatgtgctgtgccgccatatcgtagcgcatgggttgagggcgcgacggaagcggaagtgcgcgcttttctttctgagcgagggatgccattagcggatacgccagccgatcacatcggcacattgctgctcgcagcttcctggctggaagatcagagtacggaagatgagagcgaagcactggaaacactgttcagtgagtatctgttaccctggtgtggtgcgttccttggcaaagtggaggcccatgcaaccacgcctttctggcgcaccatggcaccgctaacccgcgatgccattagtgcaatgtgggacgagctggaagaagattctgaagaataagtgtgatctacgtcactcataactgcaacggataatttgttgttgcataaaatgtgtgctcgatctcattcatggccgcgttttctgctatcatgcgcggcatgaacatacttctctctattgcaatcacaacaggcattctctccggtatctggggatgggtggctgtttccctgggcttactaagctgggcgggcttcctgggctgtacggcctactttgcctgcccgcaaggtgggctgaaagggctggcgatctccgctgcaaccctgcttagtggcgtggtgtgggcgatggtcattatttacggtagtgcactggcaccacatctggaaattctcggttatgtcataaccggtattgtcgcgtttctgatgtgtattcaggccaaacagctgctgcttagttttgttccggggacgtttataggcgcatgcgcgacgtttgccgggcagggtgactggaaactggtgttacctagcctggcgcttgggctgatatttggttacgcaatgaaaaacagtggcctgtggctggcggcgcgtagtgcaaagacggcgcaccgtgagcaggaaatcaaaaataaagcgtgaggggcactcacgctttcgcttaaacagtaaaatgccggatgataattccggcttttttatctgtcaggattccggtggaacgctcatatggcggtatttcaccagaatgtcattctgccgttctgctttattttgcaaatcccacagaccacggtcgataccatcattaatcaggaaaatgacccctgtttcgatagcgctcatcaggcacagcataacaggttcgttgctggtgtaacccacttccccttcaagcaagcgctggtagtcaataaagcggaaaaccccggcctgaacttcataggaaagtatcgtcttactggtgttcacgctagaaaggatctcgccggtactcacattgacgacgcgcaggttcacggcaatctgatcgagctggtattgcgtgtcggcaccgatgccaaaatatcttgccccaaccccgccagatttgacgttgctttcataaccgataatgctaccttcaaccatgatatttgccgccgttaaagattgcagcgggattcggttattaatggcaaccgtgccgttttcttgtgccgcacgaataatcttgcgctcgttaagcaggttttgtaagccctggcgctccagcggtataaaccagcgagaatctttcagtgccgtgaccagcattgccgtggcgctttgcggaacagcagtggagaagttacttgccgggtagggtttaaattgcccggtttcgtcctgaatgttgtatacgctaacaaagattttacccgtcggcgctggcagatgggtcaaatctttgtagctctgagcacgaggcattaatgtcggtctggcggcttctttaggcggggcggttaagcatccgctcagtaacatgacggcaaccaaaagaaataagcgctgcatgattattttccttatgaagctggggcttaaaaatcggtactgttattttgtaaaccgctaacctggatggtgctggtttgtccggttttacgatctgtcacgttcaactgcaattgaccatcgcggttggcaatatcgacaatataatcgttggtcaccatgcggcccggtttaccggtattaatattgctcagtagcccacctaaaatttgactctggatggcctgagtaaagttatctaacgcactgggtgtttcaataccaaagtcatcgttatagctcggatctttataagagttttgggcctgagcgctatttaataaaaaagcgccattatttgggttaccaccaaagtttggattacggaactggaaagtcatggttccagcccaacttaatgggctaataagcatgagtagaactactgcatgtttgacacgcattgcagcctccgaacaattttttatttagaattcatcatgcgccaaatcgcccgtacttaataacgcctgatttatctggcgacgatttagtgcttcttcagtttgaatcagtgcaaagacgacagttttctcgaagtctcttttcaacggaaataaaaaagtctggaaaataacgtcctgattgaccgttatagtgatccagcttccccatcgtgcactgggcctttcattaatcgttaagttacccgtatagtcactttcccatttatcactaaaggctcggtaaaaatcatggccaatagaactaacagtatggtcagttagcaatcccgggacttctacctcaacggcgtgaagattccctgcggcgaacagaaattctgccgccacaatccagcgtaaataacgtttcatggctttatcgcctgaggttatcgtttgcccaggaaaccgcttgtgtccggttttttacggctatcttcttgaaaagattataaagatgcgttttaaccgtattttcgctgatgaacaagctacgagcgatctcgttattagacgcgccgatacgcagcttattcaggatctctttttcccgatgagtaaggagggcactttccgtgctgttataacgatagttaccactatgcgtaatcaggtagctggcaagcttttgcgtaaagtagcattcgccgcgcaggacgccttgcaacccattgacaacacgttcttgatcctccatggaataaaaaacgccgttgatatgaggccagttttcaatgtcgcggtacgggtaatcttcaggcgtatttagcaacaatattttgatattgttgtttttcctgctcaaagtatcctgccaataatggataagctttttatccgcttccatcatatccagaagaataatagagccactagagatatcgtccagagaacgttgaatattatgtaattttcctgtaattgccaggctttgtttaaggtgctgcaagagagctgtcgcctgcaaagaagatttagtgatcaacaataatgtatgaccatgaatactatggacttcattaaacatgatgaaaccccgctttttttattgatcgcacacctgacagctgcctctaaaatagaagcaccagaagtactgacagatgttgcactgctgtgtgtagtaataaatcagccctaaatgggtaaaatataaaactaatggattacatctgatttcaatctagccattacaaatcttaaatcaagtgttaaacatgtaactaaatgtaactcgttatattaaaatgttaaccttaaggttttattaagtttagaaatgatagaaaagttgtacatttggtttttattgcacaattttaaaaaatcatacaaatggtgataacttactaataatgcatataaaaaatatttcggtgtagtcctttcgtcatgtaaaacgttcttgttttttctccacacctccgtggacaattttttactgcaaaaagacgaggtttgtcacggcttgtgcgcaagacatatcgcagcaatcagcgacgggcaagaagaatgactgtctggtgctttttgatagcggaaaacggagatttaaaagaaaacaaaatatttttttgcgtagataacagcgtatttacgtgggttttaatactttggtatgaactaaaaaagaaaaatacaacgcgcgggtgagttattaaaaatatttccgcagacatactttccatcgtaacgcagcgttaacaaaatacaggttgcgttaacaaccaagttgaaatgatttaatttcttaaatgtacgaccaggtccagggtgacaacatgaaaaacaaattgttatttatgatgttaacaatactgggtgcgcctgggattgcagccgcagcaggttatgatttagctaatagtgaatataacttcgcggtaaatgaattgagtaagtctagttttaatcaggcagccataattggtcaagctgggactaataatagtgctcagttacggcagggaggcagtaaacttttggcggttgttgcgcaagaaggtagtagcaaccgggcaaagattgaccagacaggagattataaccttgcatatattgatcaggcgggcagtgccaacgatgccagtattagccaaggtgcttatggtaatactgcgatgattatccagaaaggttctggtaataaagcaaatattacacagtatggtactcaaaaaacggcaattgtagtgcagagacagagccaaatggctattcgcgtgacacaacgttaatttccattcgacttttaaatcaatccgatgggggttttacatgaaacttttaaaagtagcagcaattgcagcaatcgtattctccggtagcgctctggcaggtgttgttcctcagtacggcggcggcggtaaccacggtggtggcggtaataatagcggcccaaattctgagctgaacatttaccagtacggtggcggtaactctgcacttgctctgcaaactgatgcccgtaactctgacttgactattacccagcatggcggcggtaatggtgcagatgttggtcagggcagtgatgacagcagtatcgatctgacccaacgtggcttcggtaacagcgctactcttgatcagtggaacggcaaaaattctgaaatgacggttaaacagttcggtggtggcaacggtgctgcagttgaccagactgcatctaactcctccgtcaacgtgactcaggttggctttggtaacaacgcgaccgctcatcagtactaatacatcatttgtattacagaaacagggcgcaagccctgttttttttcgggagaagaatatgaatacgttattactccttgcggcactttccagtcagataacctttaatacgacccagcaaggggatgtgtataccattattcctgaagtcactcttactcaatcttgtctgtgcagagtacaaatattgtccctgcgcgaaggcagtagtgggcaaagtcagacgaagcaagaaaagacccttagtttgcctgctaatcaacccattgctttgacgaagttgagtttaaatatttccccggacgatcgggtgaaaatagttgttactgtttctgatggacagagtcttcatttaagtcaacaatggccgccctctagtgaaaagtcttaatttgttgaaatatcgagcataagatgaatctggagagaatggtctgctgcgaatcagccaacctgaaagtatggataacacaaccctcaaggatgactaatcattgaggaaatagaataaatgttcagaccttttttaaactctcttatgctcggcagtttgttttttccttttattgccattgctggaagcaccgtgcaagggggcgtgatccatttttatggccaaattgtggaaccggcatgtgacgtcagcacccagagtagtcccgtagaaatgaactgcccacagaatggttctattccgggcaaaacctactccagcaaagcgttaatgagcggcaatgtcaaaaacgcgcaaatagccagtgtaaaagtgcagtatcttgataaacagaaaaagctggctgtaatgaacatcgaatataactaagtttctgaacaactcacgttgctgagcagaaaaatgcgatttaaccaaaaagcctgctgtacacttaagaaacaagaaggtgtaaggaggcgttatgaaaacgcgtattcatgttgtgcagggtgatattaccaaactggccgttgatgtgattgtgaatgcggctaatccgagtttaatgggaggcggcggcgtcgatggggccattcatcgcgcagcgggtccggccctgctggatgcttgtttaaaagtcaggcaacagcagggcgattgccctacggggcatgccgttattacgcttgcaggcgatcttcccgctaaagccgtagtgcacaccgtcgggccagtctggcgtggtggtgaacaaaacgaagaccagcttttgcaggatgcctatctcaatagcctacgactggtggcggcaaacagctatacgagtgtggcttttcctgcaatcagtactggggtttatggttaccctcgtgcggcagcggctgaaatcgcagtaaaaaccgttagtgaatttattacccgtcacgctttacccgaacaggtatactttgtctgttatgatgaagaaaacgcccacctctacgaaagactccttacccaacaaggagatgaatgatttgccccggctggcgagcgcggtgctgccactgtgtagccaacatcccggtcagtgtggcctttttcctctggagaaaagtctggatgcgtttgccgcccggtatcgtctggccgaaatggcagagcatacgctcgatgttcagtattacatctggcaggacgatatgagcggtcggttactgttttccgccctgttagccgcagcaaagcgtggcgttcgcgtccgtttgttgctggacgacaacaatacgcccggacttgacgacattttacgcttgcttgacagtcatccacgcattgaagtccggctttttaatcctttcagctttcgcttgctgcgtccgcttggttatatcaccgacttttcccgtcttaatcgccgtatgcacaataaaagtttcactgtcgatggcgtggtgaccctggtgggaggacgaaatattggtgatgcctattttggagcaggggaggagccactttttagcgatttagatgtcatggcaataggacccgtggtagaggacgttgccgatgatttcgcccgctactggtattgcaaaagcgttagtcccttacagcaggtgctggatgtcccggagggtgaaatggcggatcgcatcgagttacccgcctcctggcataacgatgccatgacgcatcgttatttacgcaaaatggaatccagtccatttataaatcatctggttgatggaacattgccgcttatctgggcgaagacacgtttattaagtgatgatccggcgaaaggggagggcaaggcaaaacggcatagtctgttaccgcagcgcctgttcgatatcatgggcagtcccagtgaacgcatcgatattatctcttcctattttgtaccgacacgcgcaggtgtggcgcaactcttacggatggtgagaaaaggggtaaagattgcgatcctaaccaattctcttgccgctaacgatgttgctgtcgtccatgccggatacgcgcgctggcgcaaaaaattgctccgctatggcgtggaattatatgaactcaagccgacgcgtgaacaaagtagtacgttacacgatcgcggcataaccggtaattccggagccagcctgcatgctaaaacctttagcatcgatggtaaaacggtgtttatcggctctttcaatttcgatccgcgtagtacattgctcaatactgaaatgggcttcgtgatagagagcgaaacgctggcacagttaattgataaacgctttattcagagccagtatgatgcggcctggcagctccgtctggacaggtggggacggatcaactgggttgatcgtcatgcaaagaaagagattattctcaaaaaagaacccgccaccagtttctggaagcgggttatggtcagactggcgagcatattgcccgtggaatggttattgtaaatgtggcttaacgggctggtgctttatcgttctcacgcttaacaaccggtttaccagagaacaaaaacttcagtaacgggatgcgcaaatgaatttcatacagaattatcgcaatccctactacaaatatcaggccacagagaaaaccaagccagttggaggtgatgtgcggtgtaatgtatgcgccgaaaaacagcgttaacgggtggtgaaccagatagataaacaggcttgcgttaacaaaataagtcacccgcgcactctggaagttaagcaaacggtggccaaaggagaagaccacattcaccatccacagaccgaggaccatggtgatcacgctctcggtttcgtacatccaggcatcgccactgccatagcgctggttgagtaaataagcgacaaacgccaatgctgctgcaagggtacagccacgagacggcgtggtaaacaaggctttaagatgagggaaaatgaaagccagtgcgccgaggataaagaacggcaaataaaacagcgtttgcatgacaataaaattgaacatgccattactcagaatgggcggatacacaataaaaatcgttcttcttattaccgcataaccgatgccgaggcataaaaaaatcacgcttagttttaccatgctgaattttttattcgttttatcagaattttctaaattatttctgatgcgcttaaatatccatacgcacagcgtcgtcatgaccactaacaccagtaaaaaccacaggtgacttattaattcccaggccaacgtattatatttgtcatacaaactcagcccaggccaactttccgcttttcctttgacatattgcagcataataaattgcggtaatgtcagtagggggatggctgttaacatcgggatacctacacgttcgacacgtactttccaccattttttcaagggatagcgtaaaaaaagcatgtaggaaaagtagccggatataacgaaaaatacctgcatgcggaagctgtggatgaagtcattaaaaagggtcagccacaaactactttcggcgctattcacatgccatgtatggctgctatagattaaagaaatatgaaaaggtatccctaacaacatcagccaggcgcggatggagtcgaggaaatattcacgttgcgcgggtactgggttcatatatggttaactaatctcggatttttcgtcttatccctgtcgggttatgcctttaggcttgttgccatagtgacaccgacctgaccgcgccaggcgcaggcttcaaggtttttatgcatagcatcatcgctaccactaaccagaatggaagcgtctgtaagacggttgataaataaatttgctggcaaaccctacacgaagtcgatgcttctgtctttaggagaagcacggaaagtgaaaacggttgcaatcaggtgcttaatccatgagccagcgtgctgaacgataccgggattctgttgtcggaatggctggttatccattaaaatagatcggatcgatataagcacacaaagggggaagtgcttactaattatgaaacataaactacaaatgatgaaaatgcgttggttgagtgctgcagtaatgttaaccctgtatacatctagtagctgggctttcagtattgatgatgtcgcaaagcaagctcaatctttagccgggaaaggctacgagacgcccaaaagcaacttgccctccgttttccgcgatatgaaatacgcggactatcagcagatccagtttaatcatgacaaagcgtactggaacaatctgaagaccccattcaaactcgagttctaccatcagggtatgtacttcgataccccggtcaaaataaatgaagtgactgccaccgcagtcaaacgaatcaaatacagcccggattatttcactttcggcgatgttcagcatgacaaagatacggtaaaagaccttggctttgccggttttaaagtgctttacccgatcaacagcaaagataaaaacgatgaaatcgtcagcatgctcggggccagctatttccgcgtgattggtgcaggtcaggtttatggcctttctgcccgcggcctggcaattgataccgccttgccaagcggtgaagaatttccgcgcttcaaagagttctggatcgagcgtccaaaaccgactgataaacgtttaaccatctatgcattgcttgacagcccgcgtgcgacaggtgcttacaaattcgtggttatgccagggcgtgacacggttgtggatgtgcagagcaaaatctatctgcgcgataaagtcggcaaactgggggttgcaccgttaaccagtatgttcctgtttgggccgaaccaaccgagccctgcaaataactatcgtccggagttgcacgactctaacggtctctctatccatgccggtaatggcgaatggatctggcgtccgttgaataacccgaaacatttagcggtcagcagcttctccatggaaaacccgcaaggctttggtctgttgcagcgcggtcgtgatttctcccgctttgaagatctcgatgatcgttacgatctccgtccaagcgcatgggtgactccgaaaggggagtggggtaaaggcagcgttgagctggtggaaattccaaccaacgatgaaaccaacgataacatcgtcgcttactggacgccggatcagctgccggagccgggtaaagagatgaactttaaatacaccatcaccttcagccgtgatgaagacaaactgcatgcgccagataacgcatgggtgcaacaaacgcgtcgtagtacgggggatgtgaagcagagcaacctgattcgccagcctgacggtactatcgcctttgtggtcgattttaccggcgcagagatgaaaaaactgccagaggataccccggtcacagcgcaaaccagcattggtgataatggtgagatagttgaaagcacggtgcgctataacccggttaccaaaggctggcgtctggtgatgcgtgtgaaagtgaaagatgccaagaaaaccactgaaatgcgtgctgcgctggtgaatgccgatcagacgttgagtgaaacctggagctaccagttacctgccaatgaataagacaactgagtacattgccgaagactgatatccgcgccgttcatcaggcgctggatgccgaacaccgcacctgggcgcgggaggatgattccccgcaaggctcggtaaaggcgcgtctggaacaagcctggccagattcacttgctgatggacagttaattaaagacgacgaagggcgcgatcagctgaaggcgatgccagaagcaaaacgctcctcgatgtttcccgacccgtggcgtaccaacccggtaggccgtttctgggatcgcctgcgtggacgcgatgtcacgccgcgctatctggctcgtttgaccaaagaagagcaggagagcgagcaaaagtggcgtaccgtcggtaccatccgccgttacattctgttgatcctgacgctcgcgcaaactgtcgtcgcgacctggtatatgaagaccattcttccttatcagggttgggcgctgattaatcctatggatatggttggtcaggatttgtgggtttcctttatgcagcttctgccttatatgctgcaaaccggtatcctgatcctctttgcggtactgttctgttgggtgtccgccggattctggacggcgttaatgggcttcctgcaactgcttattggtcgcgataaatacagtatatctgcgtcaacagttggcgatgaaccattaaacccggagcatcgcacggcgttgatcatgcctatctgtaacgaagacgtgaaccgtgtttttgctggcctgcgtgcaacgtgggaatcagtaaaagccaccgggaatgccaaacactttgatgtctacattcttagtgacagttataacccggatatctgcgtcgcagagcaaaaagcctggatggagcttatcgctgaagtcggtggcgaaggtcagattttctatcgccgccgccgtcgccgcgtgaagcgtaaaagcggtaatatcgatgacttctgccgtcgctggggcagccagtacagctacatggtggtgctggatgctgactcggtaatgaccggtgattgtttgtgcgggctggtgcgcctgatggaagccaacccgaacgccgggatcattcagtcgtcgccgaaagcgtccggtatggatacgctgtatgcgcgctgtcagcagttcgcgacccgcgtgtatgggccactgtttacagccggtttgcacttctggcaacttggcgagtcgcactactggggacataacgcgattatccgcgtgaaaccgtttatcgagcactgcgcactggctccgctgccgggcgaaggttcctttgccggttcaatcctgtcacatgacttcgtggaagcggcgttgatgcgccgtgcaggttggggggtctggattgcttacgatctcccgggttcttatgaagaattgccgcctaacttgcttgatgagctaaaacgtgaccgccgatggtgccacggtaacctgatgaacttccgtctgttcctggtgaagggtatgcacccggttcaccgtgcggtgttcctgacgggcgtgatgtcttatctctccgctccgctgtggtttatgttcctcgcgctctctactgcattgcaggtagtgcatgcgttgaccgaaccgcaatacttcctgcaaccacggcagttgttcccagtgtggccgcagtggcgtcctgagctggcgattgcactttttgcttcgaccatggtgctgttgttcctgccgaagttattgagcattttgcttatctggtgcaaaggaacgaaagaatacggcggcttctggcgcgttacattatcgttgctgctggaagtgcttttttccgtgctgctggctccggtacgcatgctgttccatacggtcttcgttgtcagcgcgttccttggctgggaagtggtgtggaattcaccgcagcgtgatgatgactccacttcctggggtgaagcgttcaaacgccacggctcacagctgctgttagggttagtgtgggctgttgggatggcgtggctggatctgcgtttcctgttctggctggcaccgattgtcttctcgttgatcctgtcaccgtttgtttcggtgatttccagccgtgccaccgttggtctgcgcaccaaacgctggaaactgttcctgatcccggaagagtattcgccgccgcaggtgctggttgataccgatcggttccttgagatgaatcgtcaacgctcccttgatgatggctttatgcacgcagtgtttaacccgtcatttaacgctctggcaaccgcaatggcgaccgcgcgtcaccgcgccagtaaggtgctggaaatcgcccgtgaccgccacgttgaacaggcgctgaacgagacgccagagaagctgaatcgcgatcgtcgcctggtgctgctaagcgatccggtgacgatggcccgtctgcatttccgtgtctggaattccccggagagatattcttcatgggtgagttattacgaagggataaagctcaatccactggcattgcgtaaaccggatgcggcttcgcaataaaaacgtagttgcctgatgcgctacgcttatcaggcctacatcgttcctgcaatttattgattttgcaagactttgtgggtcggataaggcgttcacgccgcatccggcaaaaacaacgagccaataaaaataccggcgttatgccggtatttttttacgaaagaggtatcaaatgcgtttaattgtggtgagcatcatggtgaccttgctgagtggctgtggcagcattattagtcgcactataccggggcaggggcatggcaaccaatattatcccggtgtgcaatgggatgtgcgtgactccgcctggcgttatgtcacgatccttgatctgccattctctctggtttttgatactttactgctgccgatcgacattcatcatggcccgtatgagtgattaacgttcatcccactcatcagctgctgcgcgtccttcctcggtatccagcggtggctcaagctgaaattccccctcgtcccattcatgtaatgtattctcttcctgccactcctggcgtatctctatctcatcatagtcgccatcaaaaacactttgcgcggcttcaccgctaagcataggtaaacattcaccttcttccccttcgtcggcaaaaaactcaacttgccacatgatgtcgccgtcctgcaaaacgtatttttgggcattgaactgttgcacattcgcatcttcggcgtcgatgccggggttgtctgcaagaaattcttcgcgtgcagcgtcaatggcttcttcaagcgttgcgtacatggtcatcacgattctccctttgagttgatgaggtttcagggaaaaggatagctgattctccgcttttgcaagtatgaaaggcgaaaaatcagttgcttacctggggtattcgacgacgacgtagactgttccaactatagactgcgttgaataacactacgccagcggtgacgagaaataccgctctgaaaccgtagttcgcactaatcgctgctcccatcaatggtccggtaacgttgccaatatcacgaaagctttggttatagctgaagatacgcccggcgatctggttgctgctgttgtaaaccaacagtgtctgtacggcggggagtagtgcaccatcggcggcaccgagcaaaaaacgtaaaatcccaagttgcaatggcgtctgaacgtaagacattgggatcaacagcagtacagaaaagatcagcgctgtaatcaggatcttttcgggtccgattcgatcgccaagtttgccgagtcgtggtgcacttagcagagccgccacgcctggcacgctggcgatcatgccactgataaaggcgacgttactgacgttacccgccagttcgcggacatacagcgtcagaatgggggcaatactgcccgtcgccacctggatgattaacgtagtgacaaacaggctgagtaccagtttcgggtttttaagacttgtcaccacttcccgcatgtgcagcatctcttttttgctgaccggctggaatttttctctgatgcaaaacagggtgacgaaaaagcagagtatgagcacactggcggtaataaagaataccggacgtaagccgtagctatcggcgagcaggccgccagccattgggccgagcaacgcaccactaacgccgcctgtggagagcgtacccagcgcccagccgcttttattacgcggtacttgtgtggcgataagagcattagcgttggggacaaatccgccaagtaacccaagaagcgcccgcaggatcaaaaactgccagatattttgtgccagccccatcaacaccatcacgatgcccatgccgagggcagagcgtaatagcatgagttttcggcctttacggtcggcgagtccaccccaaaacggactggcgatggcgctaaataaaaatgtaatgctgaagacaataccggaccacatattcagggcggagtgaccggtaacgccaagctgctcaacgtagaggggtaagaagggcattaccagactgaaggcggcaccggtaagaaaacagcctagccaggcgacgatcaggtttcgtttccagtttataggggtgtcattttcacagggactcatagcaatccgctgttggtgcgccaggcgcggtgaacataagaagaaaagataagcacactaattatgcgcccgacttccagggggcgcaatccagagagcttttatcgctaaatcagggggatttgctgtggtaatgccggatgccattctgaagcatccggcatgggagatttaatagcgactaggaacgccttccgggcgtgttttaaagcgacggtgtaaccacatatactgctctggtgccatcatgatgcatttttcgaccactttgttcatccacgcggcggtagtttcggcatcatccagtggcggagaacactctggcggcagcataatcaattgataccctttgccatctggcttacggcgtggaacgaagggcaccagacatgcgccggacatccgtgccagcatccaggttccggtcgtggtcgcagcctgctcaacggcaaacaacgggacgaaaacgctactgcgcgggccgtaatcatgatccggtgcgtaccagaccacttcgccttttttcagggctttaatcatgccttttaaatctttgcggtcgagcatgcttttattactgcgcaaacggccccaggtttgtagccagtcaatcagtggattatcgttcgggcgataaacgccaatacccggttcctgcataccaaactgccgcgcacccagctccagtgtcagaaaatggatgccaactaacaggatgccgcgtttttgcgcctgcacgtcacgaatgtgttccatgccgatcacttccgtccagcgggcgattcggcggtccggccagaaccacgccatgccggtttccatcaggcccatgccaacggattcgaaattcttcaccaccattttacggcgttcttgttcgctcatttccgggaagcacagttccaggttgcgatgcacaatttttgcgcgtcgtttcataaaacgtaacgccagttttcctaatccacaaccgaggcggtagataaccgggtagggcaattgcacgactaaccaaagtacgccaatacccaaccaggttaaccaataacgcggatgaagcagtgcggtggagaacttgggtagattcgtcatatcaatcctgtttttcaacctattcgggcaattgtatgtattgtcgcattttttcgcccgcaaccaaaatttgtggctgaagactgggcgaaattgccgcgcttgtaaataacaaataatttttaatgcgcaaatgtagcgtaaaatgtgtggatgttaattatcgataattgctatatcatgccgcggatttttactttcccatctcgcaggaaccgtacaccatgccagtgttacacaaccgcatttccaacgacgcgctaaaagccaaaatgttggctgagagcgaaccgcgaaccaccattagcttttacaagtatttccacatcgccgatcctaaggcgacccgtgacgctttatatcagctgtttaccgcgctgaatgtttttgggcgagtgtatctggcgcatgagggcattaacgcgcaaatcagcgtacctgcgagcaatgttgaaacatttcgcgcgcagctctatgccttcgacccggctttagagggtttacgcctgaatatcgcgttggatgatgacgggaaatccttctgggtactgcgcatgaaggtacgcgatcgcattgttgccgacggtattgacgatcctcactttgatgccagcaatgttggtgagtatctgcaagcggcggaagtgaacgccatgcttgacgatcccgatgcactatttatcgacatgcgtaaccactatgagtatgaagtggggcactttgaaaacgcgctcgaaattccggcagataccttccgtgagcagctgccaaaagcagtcgagatgatgcaggcacataaagataaaaaaatcgtcatgtactgcaccggcggcattcgttgtgaaaaggccagtgcctggatgaaacataacggattcaacaaagtctggcatatcgagggcggaattattgaatacgcccgtaaggcgcgcgagcagggcttgccggtgcgttttattggcaaaaattttgtttttgacgagcggatgggcgaacgtataagcgatgagattatcgcgcattgccaccagtgcggcgcgccgtgcgacagccataccaactgtaaaaatgatggctgccacctgctgtttattcagtgtccagtatgcgcggaaaaatacaaaggttgttgtagtgagatttgctgcgaagaaagcgcgttaccgccagaagaacagcgacgccgtcgggcaggacgtgaaaatggcaataagatctttaataagtctcgtggacgtctgaatacaacactgtgcattcctgatccaacagaataaatatcattgccggatgcgtgccatccggcaacatttcacgcttacttctgctgtacgccttccacactaataatcagatccacttcctgagaagctggacctaaatctgtcttgatattgaagtccttgagcttaattttgccttcggcctcgaagcctgcacgtttaccaccccatgggtcgtcgccctgaccaattaatttcgcttccagcgtgacgggtttggttacgccattcagcgtcagatcgccggtaatatccagttcgtcaccgtctttcttcacgctggtggaggtgaatgttgcctgtggatattttgcggtattgaggaaatctgcactgcgaagatgtttatcgcgttcggcgtgattagtatcgacgctggtggtgttaattgtcacattcactttatcggcagccggatttttttcgtcaaaggtaaaagtaccgtcgaaatctttaaaggtgccgtataaccagctatagccaaggtgctggatgcggaaattaacaaaggcgtgctgaccttctttgtcaattttgtaatcggcggcaaccgcactaccggcagagaacatcagggacgcgaaggttaaaccaagcaggctttttttcattttttatactccatagtcagaactgctctttcccagcatgcgcttcagagtgtcgtctttatcgatgaaatgatgcttcagggccataaatccgtgcataacggacagtactacgacgctccacgcgagccaaaaatgcagggcaccggcaaagtctgcctgtgcgccagcgtcggcaagggtcgcggggacgtcaaaccagccaaaaacgctgatcggtttaccatcggcagtactgatcagatagccgctgatgccgatggcgaaaagcaataggtacaatgcgagatgtccagctcttgcggcaagacgagtcatggggctataactcggcagcggacccggcggtggagatatgacacgccacagaacgcgaataaccagccccatcattaacaaaataccgatgcttttatgcagttcgggtgctttgtgataccagccatcgtaataactgagcgtgaccatccacagacctaaagcaaacatgccgtagacaataattgcgcttagccaatggaaggccgcagatataacaccatagcgttcaggggtatttgtgaaactcataagtgcatccaaaacgaatttgcgagagaaagaaaatggcgtgtcggagaatgaattgcaacacaaaaataacaaattgaatgatatttatttttatttcaataattttgaattaataatgaaagaatcttcataagtttagtgggttcagcatcagagatgtctggtgagtgctgtagaagcaggaataatctcattcaatttttcacgctaaatgaaagggagattaaatatttgtcagtttatgtcagtgcggaaaattaaaaataaaacacatagatcagatccataattgccaacaatccccagagaaaaagataaagcatcagatgctcgcgaatattattgatgagatagtgcaacagccgacgcattaaatactcctgtaaaaacggcctcattctggaggccgtaatgatgattattggaagcgggaaagcctgaatggcgtcaaatcaaaatcgctttttttgtcttgcgcaaaatcggcagctatttcccctaaaacactcgcaaatttaaaaccgtgcccactcaggccggtaatgagcagtgtattatcgtggccgggtagggtatcgataataaaatcttcgtcagggctattatcataggtgcaggcagcgccgtacaggcagcaaccgatacccggcaatacattgcgcaagaacgggaaggcttcactcccatcactggccacttccgcaaacggaacacgttcatccgcactatggataacctggcctccgttatgtttgccaatcttcaacgcgtcgttttctgccggaaaaccataatattgatcgccattgggcagttcaccggtaaacgccgggaatttattcttcacgctatagcggccatcggcctgataccaggcaaatactttgcgtacgggctggacaggcagctccgggagcaggtcttttacccatgttcccgcgcagacaatcgcttttttcgcctgatactcaccgtcagccgtttcaatagttacgccatcatcgtcatgacgaattgcggtgaccgggcagttgaacagttgcgcacagcccgcttccttcgccagttggatccaggttttaatcgccagttcgctgcgcaaaaaaccggaatcagtttcaaataagccgatgtagttgtccgggacgcgtatttccggccagcgggccataatcccttgcgcatcgagcttttcaacgttgagttgccattgttcggcgctgtgggcgacgttggcgagaaatgtggaatcagccgggccaaggttaatgacgccagagcgtacaaaaatgggatcttcttcgttgtggcgggagagttcatcccacagcgtttgcgcgcggaggaccagcgggacatacttttcgccttcaccataagcatggcgaattaatcgcgtatcgccgtggtggctgccgtgttgatgcggtggcatatgggcgtcggtcattagcacgtttaaaccggcgcgggttgcataatacccggcggcagcgcctacggaaccgctgccaataatgatgagatcgtatttcatttttttctctctgctctcatggtttaagcagagtaattaactgaatgcagatatacaacccagaaatggtaaaggcaccggtgaggtgccttttgggtggatggtcatgtcatgttaatgacgccgatactcgtttacctggaaatcaccggattcaattttggcgattcctgcttctaatatgctaataaattgtctggcaacatcagtggttaaccagagcgtctgaccaacttcagtcccttcctgctcggacttatttggggtctggtagtgcaaacgcaacatcagcgcatcatagctatcaacggtgctgatgtcccaccctacgagcggatgagtctgaatgacttcattatttttttccatcatggccccctaattcgtgttactagacaacgttattcgaggttcaatgcgtttttatctgaagcaacttcagtataccaataagtaagggtattcaccgaatttttaaagggggaaacagataaatttctgcttttaagatttatatgaacaataaaacagcatgtcattcatatttttttagcatattgtgcaattattttgaggaagtgtagaaattttgtactcaaaattcgtaagtaaaataaaaaagccggggcgacccggcaaaaaaaatcactgcatattattcgctgacaaaccagtcatcggcgctttcccacgtttcctggagaatttcactaatgcgctgtttatcttcttttgtcgcgccaataacgcttaaattattcgctgcggcataacgtacgcttacgtggccttcattatcaggaaacgcatactgaatacggcgggaaagttcgccagccagggcgtcaatagccccagctggcaatggagaagttttcgctatggtgacttcaattcgcataatagccccctgttgaatatactggttatttatacaggtaaaataacctaatgacaacaggaagctacgatttttattgtttaacggaccagcgtaccgtttccccggcgaggaatggcaccagcgtgtcatcagtcagtgcgatgctttcagcaacctgttgctcttcacgtaccagttcgatgaatgtgtcgttgaccggcaacccatagaactgcgggccgtttacagaacagaatgcttcaaagtgctgcaaagcattcatttcttcaaagacggtagcgtaactgcccagcgcggttggggcgttgaagcagcccgcgcagccgcaactgctctctttgcgatgacgtgcatgtggcgcagaatccgtaccgaggaatactcgattaaaaccgctggcgaccagttcacgcaatgcctgttggtgaatattacgtttgaggatgggtagacaatacaggtgcggacgcacgcctccaaccagcatatggttgcggttaaacatcagatgctgcggagtgatggtggcagccagccgttcatttccgtcacggacatagtcggcagcatctttggtggtgatgtgctcaaaaacgactttcagcgcagtcaggcgctggcgcagaggttccatcacgctttctataaagcgcgcttcacgatcaaaaatgtcgatatctgcatgtgtcacttcaccatgcaccagtagcggcataccgattttttccatgcgctcaagtaccggcatgattgcgtcaatactcgtcacgccgtggctggagttagtggttgcgtttgccgggtaaagttttgcagcggtgaacacgccttcgttaaatccgcgctccagctcattaggatccaggctatctgttaaataacaggtcatcaatggggtgaaatcgtgcccggcaggtacggcgtcaagaatacgctggcgatacgccacggcagcctcaacggtggtcacgggcggagccagattgggcattacgatagcccgtccataaatttcgctggtatatggcacgacagtttttaacatgtcgccatcgcggaggtgaaggtgccagtcgtctgggcggcggatctttaatacctgggatggtgcagtcattaatctctatgctccggctgaagggatgtttttgccggacacaaaggataagcggaaacgttttcctttgcacgaaaaataaagggcgcgaatgcgccctcgtgattaatcagtaaatggaatgacaatttcgcctggcttcacttcaatgcctttcgccagttttttcgccattgcttcgccctggctgccatcttcgcgcaggacgtaagcaggttgctggttaaagtaattgcgtaatgcctggttcaaatagggaagcaacgtttgcatcaccgtttgcattttttccggttgtaccgtcgcatcgaccacttccatctctttcaggaagatcgcacctttttctttatcaaacacgggcagcgctttcagcttcagtttcatggtcgctttctgactaccgaacagggagttcatgtccagattggcgtctccggttagggtaaccttattcggctcttcgcgaccaatttggctggtcaggtttgtcagaacaatatgggcgtcagccacgccgggtaaaccgatatctttactgaaattattatgtttcgcaaggctctggttaatttcttgttcggtgatggtgtattgggtgagttgattacagccaacgagcaggccactgacgatcaatgcagcggcaaataaaaacttgttcatggtagtcctcgacatgaaatctgcgtcaatatcctgacacaacgcagcatgtgtcaccagcgataaactcgccagcagaaaaaactgaaaacggcggcaacccgcgaatacaggctgccgcggcgggtcaggattaaatcgccatactacttaacaaattgatttgtgtctgtttcgccatattatcgcggtaatcagcaacgcggcttggccagttaattccggctaccagcgtcagattacgcagtagcgggaatagctgaatatcatcttcgctaagttcgccattcacggcgttcggtttgacgatcagtttgtccagcgcacgtaaatcatcgctgatattcttaatcagaccgtcagagtgggccagcaggtcggcaaaattacccgcgctggcctctttcttgtcgacgaaatatttgcgcgcggcgggagtagaaaactcatcaaatgcgcttttggcaaaacgcggcaacagcagtttgttggcgtagccattgaccttgcgcagccactcttcaatggcaggggaacgtttgccggtcagtaacggtttgccgtcgagtttatcgacatagtgaacgatgtccatgctttctggcatatagcggctgtcatctttttgcagaatgggaacctgtttttgaccgaccatccgggtgggtgtttctgcgtcgtcgttgagcagaacatgtaattcgacggggatatttttcaggccgaaaatcatgcgggctttgaggcagtaagggcagtgatcgtaaatgtatagcttcacgtgactcctccatttggctgtcagttcactttcagtatgaaggagtcaggggggagtatcaaatcaggcgtcgcgttcaagcaaacgacgcgcggcgcgtttctggctaaactgccaacccagcgcaaggaaagtgaagatgccaataatgcccagcatcatccacggaagctctggctggtgcgcgcttttgcccaggtcaaacagccagccgccaccgatataaccaatagcgccgccaatcgccagacccagacggctaaaccccatatagctgccgcgagctcttgcgtccgccaggctagcacttaaggtttcacgcgcaggctcggcaatgatgctcccgatataaaacagacaaatcagggtgaaaagttgttgcaggccgctgaccatgcccaccggcatcatgcttaaactcattatcaacagcccagccatcaaccggtgttccagacgaaaatgcttttcactccagcgggcgatagggtagagcaacgttaagctcagacacgcttcaatggcatacatccatttaacggcagagggcgcgccagccacgtcgttgaccataattggcagcatcagcatcacttgtacagccagcatgtagtaacccgccagcgtcagaacataggtgacaaaacgcttgtcacgcatcacgcgggtcatgccttcgcgaacgggcgtgcgtacggtggagagtttccatgctggtaacaaccacgcattgaacgccgcacatagcacaaatagaactgcccctgtggcgcagaccaggcgaaagtcgtattgcaacagccagctccccaacaatgcgccaatgaccgcaccggcactgtcctgcatcatcaacaggctgaaaaaacgaccacgctgctgtggacggattaatttcaccaccagcgcgctacgcggcggatcaaacaacgtgccaccgagtccgctgagcaggcaactaaaccacaatagccacggttcgtgggcgatacccattgtggcgaatccggcggcgcgcatcagcataccggtaacaatcatcggtttggcaccaaagcggtcggcaattgcaccgccgaaaatacccagaccttgctgaataaattggcgtagaccgagagcaataccgaccatgacggcggcccagcccatttgatcaacgaagcggatagagatcagcgggaagacaacaaagaaccccagcacgaccagcatattatcgatgagcaggaaatatttacccaggttcctcgcctggctcacgcgggacatttcccctcccgggaaataaaagatgagcactttctattctgcattgccgctaagacttttcccatcacttcggggacaatatttttttatcaaaacgtcgctttgatagagagtttttatcaaatatgtgaataatgcagaaaatggcattttggacttttcacagggtctggttgcgcaggtatagtaatacttacagcgtattaaagacgttacgggaaggagtaggtatagaatgtttggctatcgcagtaacgtgccaaaagtgcgcttaaccacagaccgactggtcgtgcgtctggtgcatgatcgtgatgcctggcgtcttgcggattattacgcagagaatcgccatttcctcaagccctgggagccagtgcgcgacgaaagccactgttatccaagtggctggcaggccaggctggggatgattaacgaatttcataaacaaggtagtgctttctactttggcttattcgacccggacgaaaaagagattattggcgttgccaatttttccaatgttgttcgtggctcttttcatgcctgctatctcggttatagcattgggcaaaaatggcagggcaaaggactcatgtttgaagccctgaccgcagccattcgttatatgcagcgcacccaacatattcatcgcattatggctaattatatgccgcacaataaacgcagcggtgatttactggcgcgactgggttttgaaaaagaaggctatgcgaaagactatctgttgattgatggacaatggcgcgatcacgtactgacggcattaactaccccagactggacgcccggccgctaaggagaatctcatgaaatatcaacttactgcccttgaagctcgcgtgattggttgcttgctggaaaagcaggtgaccacgccggagcaatacccgctcagtgtcaatggtgtagtcacggcctgtaatcagaaaacgaaccgtgaaccggtcatgaatctgagtgaatccgaagtgcaggaacagctggataatctggtcaaacgtcattatctacgcacagtgagcggttttggtaatcgggtcaccaaatatgagcaacgtttttgtaatagtgaatttggcgatctgaaactgagcgcagcggaagtggcgttaatcaccacgttgttattgcgtggtgcccagacgccaggtgaactgcgcagccgcgccgcgcgaatgtatgaattcagcgatatggcggaagtggagagcacgctggaacaactggcaaatcgcgaagatggtccttttgtggtgcgtctggcccgcgaaccgggtaaacgcgaaaaccgctacatgcatcttttcagtggtgaggttgaagatcagccggcggtgacggatatgagcaacgcggttgacggtgatttacaggcccgcgtcgaagccctggaaatcgaagtggcagaactgaaacagcgtcttgatagcttgctggcccatctgggagattaaagtgaaaaaattacgtatcggcgtagtgggattaggtggcattgcgcaaaaagcgtggttaccggtgctggcggcagcgtctgactggacgttacaaggagcctggagccctacgcgcgcgaaagccctgccaatttgtgaaagctggcgcattccttatgccgatagcttatccagccttgccgccagttgcgatgcggtttttgtgcattccagcaccgccagccactttgacgtggtcagtacgttactcaatgcgggggtacatgtctgtgtcgataaaccgctggcagaaaatctgcgcgatgctgaacggctggtggaactggcggcgcggaaaaaactgacgttgatggtcggttttaaccgtcgtttcgcaccactctacggtgagttaaaaacgcaactcgccaccgcagccagcctaagaatggataaacatcgtagcaatagcgtcgggccacacgatctttatttcacgttgctggatgattatctgcatgtggtggataccgcgctgtggttgagcggcggcaaagcctctctggatggcggtacgctactgactaacgacgctggcgaaatgctgtttgccgagcaccattttagcgctggtcctttgcagatcaccacctgtatgcatcgccgtgccggaagtcagcgtgaaaccgtgcaggccgtgactgacggtgcgctcatcgacattacggatatgcgcgaatggcgtgaggagcgcgggcagggcgtagtgcataaaccgattcctggttggcagagtacgcttgagcaacgtgggtttgtcggctgtgcgcggcacttcattgaatgtgtgcaaaaccagacagttccgcaaaccgccggcgaacaggccgtgctggcgcaacgtatcgttgacaagatctggcgcgatgcgatgagtgaataaaccctgtaacatctggcggtagcaattcaccataatccaggtagactattcgcctctttcagcgcctgccttgcaggcgttttgcccgtgggtctggattagaacaccgatgaatttattaaaaagcctggccgccgtcagcagcatgaccatgtttagccgtgtgcttggcttcgcacgagacgcaattgtcgccagaatctttggcgcagggatggcaaccgacgcctttttcgtcgcttttaaacttcctaacttgttacgccgtatctttgccgaaggggcattttcccaggcatttgtaccgattctggcggaatataaaagtaagcagggtgaagacgccacgcgggtctttgtctcttatgtttctggcctgctgacacttgcgctggcggttgtgacggtcgctggcatgctcgccgcaccgtgggtgatcatggtgaccgcgccaggcttcgctgacacagctgacaaatttgccctgaccagccagctactaaagattacctttccctatatcttgctgatctccctggcgagcctggtgggagcgattctgaatacgtggaaccgcttcagcattccggcgtttgctccaacactgcttaacatcagcatgattggtttcgcgctgtttgccgcaccgtactttaacccaccggtgctggcgctggcgtgggctgttacggtcggcggcgtcctgcagctggtgtatcagctaccgcacctgaagaagatcggcatgctggtcctgccgcgcattaacttccacgatgccggagcaatgcgcgtggtgaaacagatgggaccggcgatccttggcgtctctgtgagccagatctccttaatcatcaacaccatttttgccagctttcttgcttccggtagcgtgtcttggatgtattacgccgaccgcttaatggagtttccgtccggtgtgctgggcgtggcgcttggcaccattttgctgccgagcctgagcaaaagttttgccagtggcaatcatgatgaatacaaccgtttgatggactgggggttgcgtctttgtttcctgttggcgctgccgagtgcggttgcgttgggcattctttccggtccgttgaccgttagcctgttccagtacggtaaatttaccgcgtttgatgcgctgatgacccagcgggcgttaattgcctacagcgtgggtttgattggcctgattgtagtgaaagtgttggctcctggcttttattcccgccaggacattaaaacgccagtgaaaattgccatcgttacgctgattttaacgcaattgatgaacctggcgtttattggtccgttgaaacatgccgggctgagtctttctattggtctggcggcgtgtctgaatgctagcctgctttactggcagttgcgtaagcagaaaatctttaccccgcaacccggctggatggcgtttctgttgcgtctggtggtggcggtactggtgatgtctggcgtgcttttaggtatgttacatatcatgccggagtggagtttgggtaccatgccctggcgtttactgcgtttaatggcggtcgtgctggcggggattgccgcgtacttcgctgcactggcggtactgggcttcaaagttaaagaatttgcccgccggacggtgtaacaatgcattccggcctgcagtgttcgctttaaaacatatcatgaaactgggtatgttttgtctgcctgctctgggatcgctggggcgggcatttttttgcctattttgcattgttggttagcaaggatgccattcgatgaattttaatatgttgattcaaagatgaaataaaaaagccctggcagttaccagggcttgattactttgagctaattattactcaacaggttgcggacgcgcaggagcggcagaggcatgatgtgttgccgtatgaccacctgcggcacctttaccttcgaaggcaaaagtagggcgctgccagtcactgtgacgcggtgcctccggaacatattccggtgctggagcgcgcgtcattggcgcggtagcgtggttatgctcaacggtgacctcaggttcgaccgcagctaccgtttcaacttctgctgcgacttcagcgactactggcgcggcaggttgagcaacaacttcaggttcagcaactacaacctcagcagtttcgacaacttcttcaatatctgccgtctcttcctgcggttcaaccaccggttctgcttgttctgcaacttcctgggctacggcaacatcagactcggtaatcacctgcggctgttcagttaccgcggcagcgatcacttcaggatgcgtcgtttcaaccacttccggttgcggttcggcaacctgaacgggggcttctacgacaccggccacttcttcaacaactggcgcgctaacaaccggttcgatagcggcggcgacagggacctcagtcaccatcggctgcacatgtacttcttcctgttcgcgctgctcttcaacctgtacatcttgcggacgtacaattggatagcggatccagactttgccagaggccagttccggagacgcgcacgctacggtcaacggcattgggctctgggttggataacgctcgtcacgatagcgacgacgacgctgaccacttacgcgcaggtgacgagggctgcggcgagaacgacgcggcatgccaccgttgtcacggttatcagcattgttctcttcttgctgttctggtgcagtttgcgctacgactggcagcgggactttcaccagttctgtgcgtggagctggcgcttcctgaacaattggttcggcagcgacagtttcttcaaccaccggtgcgactaccgcttcttcggctacgctttgctcgtaacgcactttctgattgagctgacgctgtttacgacgcggctgaaccggacgtacacgttcttcctgttcggtttcctgaacagattgctcttcaacattcagcgccttcgcttcttgttgcgcctgacgtttatcatcattacggcggcggctacgttcacgacgcggcgcttgctgctcgtcggcggtacgcgctttttccgttacctcagcctgctgacggctctcacgcgtctcggcagtctgctgctgtgcctggcgacgattacgacggttttcttcgcgattatcgctgccttcagtacgttcactacgggtgtcgcggcgctcattacggtcacggcggttgttctgacgaggcttgcgacgatcctgttgacgttccggtttcgcttctgctttcggtgctggttgctcggtcggtttggtttcttcaccaccgctgaacagcgctttcagtgcgccgaagaagcggctcaacagcccaggttgtgcaggagctgctggtgttgccggtgcagctttcggtgctggagctacaacaggcgcggcaggttcagctggcgttggcgcaggcggcacatccggcatggcaaaggttgccagcgcaggttgttccggacgcttacgttcagcgaactcttcttcagacggcagcgccatcgcttcttcatgcagcttcggcagcatgtagcttaaggttggggtttcttcccctttacgcacgcgcagcacgtggtagtgcggggtttccatctgatcgtttggcacaattacacagcgcacaccgtcctgacgagtttcaatggcatttaccgcagaacgtttttcattcagcaggtaagaagcgattggcacaggaacaatggcgtgaacttcctgggtgttctctttcagcgcttcttcttcgatcagacgcagaatagagaggctcaggctttcgttgtcacgcacggtgccagtaccagaacaacgcggacaaacgtgatgactggattcacccagacttgggctcaggcgctgacgggacatttccagcaggccaaagcgagaaatatggctgatttgaatacgcgcacggtcctgacgcaccgcttcacgcagacggttttctaccgcacgctggtggcgtactggcgtcatgtcgatgaagtcgataacaatcaggccgccgaggtcacgcaggcgcagctgacgagcaatctcatcggcagcttcgaggttagtgttaaacgcggtttcttcgatatcgccgccgcgggtcgcgcgtgcggagttgatgtcgatggccgttaacgcttcggtgctgtcgataacaatggaaccaccagacggcagacgaacttcacgctggaaggcggactcgatctgactctcgatctggtagtggctgaacagcgggatctcgccggtgtacagtttgattttgctgctgaaatccgggcgacctaatgcagcgatatgctgacgtgccagttcgagcactttcgggttatcgataaggatttcgccgatgtcctgacgtaagtaatcgcggaatgcgcgaacgattacgttgctctcctgatgaatcaggaacggggccgggcggctttcagcggcttttttgatggcttcccagtgtttcagacggaagcttaaatcccattgcagcgcctcagcagatttgccgacgccagcggtgcgcacgataagccccatgccttccggcagttcaaggcttgccagtgcttcttttaattcggtacggtcgtcgccttcgatacggcgagaaatgccacccgcgcgcgggttgttcggcatcagaaccagatagctacccgccagactgataaaggtggttaatgccgcgcctttgttgccgcgctcttctttatcgatctgaacaatgacttcctgaccttcacgcaacacatctttaatgttgggacgaccatgagcactgtagttagcagggaaatattcgcgggcaatttcttttagtgggaggaaaccgtgacgttcagcgccgtaatcaacaaaagcagcttccagactcggttcaatgcgggtgattttacctttgtagatgtttgcctttttctgctcgtgccctggactttcgatatccaggtcatacagacgctgcccatctacaagggcaacgcgcaactcttcctgctgagttgcgttgattaacattcttttcatcgtaacttactcattattcttacattgacgactaagctgcgggcaaagtaacgcctttccgggtgtgaaccgatggcctcgtgtctagtcgcgtcgccaacctcacggttatcgtcagctcaaagaggcgcagagtgtgagttgcccgtttttcatgcggaaaaacagcgcaattatcaaagaaacagactgggtattactctccagaaatatttccatctaccggtaaggactgcaacccgcagcccgctaactgcctgaaagatcaatacgtcttacgccattgctgcgtggatgatcggtcgggcaaaatgggttattccgtaaaatttcttgttttaacaaggatggacacggaaacggcctcattattccactgcaagccttgttatagcaagatgacttttaccatttatcacccgcttactcacagttttttcacttcttgctggtgattggtttaataaccatcaataaagtgatcacgcagtgaagtaataaggtgcaaaagtaaatataagcatagaaaaatgagtggcgcgaatcctgttggctaattagaatcgccaaccatgaaaacagagactccatccgtaaaaattgttgctatcaccgctgacgaagcggggcaacgtatcgataactttttgcgtacccaattgaaaggcgtaccaaaaagtatgatttaccgtattttgcgtaaaggcgaagtgcgggtgaacaaaaaacgtattaagcctgaatataaactcgaagcgggtgatgaggtgcgtattccaccggttcgcgttgctgagcgggaagaagaggcggttagcccacatctgcaaaaggtggcggcgctggcggacgtcatcttatatgaagatgatcacatcctggtgctgaataaaccttccggtacggcggtacatggcggcagtggtttaagcttcggcgttattgaaggtttgcgggcgttgcgcccggaagcgcggttccttgaactggttcatcgtcttgaccgggacaccagtggtgttttgctggtagcgaaaaaacgcagcgcgttgcgttctctgcatgagcaattacgtgaaaaagggatgcaaaaagattacctggcgctggtgcgcggtcagtggcagagccatgtgaagagcgttcaagcaccgttactgaaaaatattctgcaaagcggcgaacgtatcgtgcgtgtgagtcaggaaggcaaaccgagcgaaacacgctttaaagtggaagaacgctatgcatttgccaccctggtgcgttgtagcccggtaacagggcgtactcaccagatccgtgtgcatacacaatatgcgggtcatccgattgcctttgacgatcgctacggtgaccgtgaatttgacaggcagctcactgaagcaggcacgggattaaatcgcctgttcctgcacgctgcagcgttgaagtttactcatccggggaccggtgaggtgatgcgtatcgaagctccgatggatgaaggtttgaagcgttgtttgcaaaagctgcgtaacgcgcgctaatacaagcatataaacctgataatgggcggttggcctgataaggcgtttacgccgcatcaggccgccagcaccgattgccggatgcgacgtaaccacatccggcgcaaaaaattatcccatcagcgggtttttcccttcccgacgtaacatctgacacagcgcgattagcggtaaaccaaccagcgtgttaggatcacgcccctctaaacgctcaaacagcgtaatgccaaatccttcactcttaaagctacccgcgcagtgcaggggatgctctttacgcacgtaattatcaatctccgcctcgctcaggtgacggaaatggacgtcaaaaggctccacttctgtttgcagatgcccattcgcgctattaaacaacgccagtccagtatagaaggtgacgatattgccgctggctttgcgtaattgcagacgggcattttcttccgttaacggtttaccggtgatttcgccatcaagaacacatacctggtcactaccaataattaaatgatccggataacgactcgccagagattgcgctttttcttgtgccagtcgaagcaccaactgtcgcggactttcgtcgctgcgtggggtttcgtcgacctctggtgctgcacattcaaaagagatttgcagtttttccagaagagcgcgacgccatgggctggtggaggctaaaataagtttaggcatatttttttccatcagatatagcgtattgatgatagccattttaaactatgcgcttcgttttgcaggttgatgtttgttatcagcactgaacgaaaataaagcagtaacccgcaatgtgtgcgaattattggcaaaaggcaaccacaggctgcctttttctttgactctatgacgttacaaagttaatatgcgcgccctatgcaaaaggtaaaattacccctgactctcgatccggttcgtacggctcaaaaacgccttgattaccagggtatctatacccctgatcaggttgagcgcgtcgccgaatccgtagtcagtgtggacagtgatgtggaatgctccatgagcttcgctatcgataaccaacgtctcgcagtgttaaacggcgatgcgaaggtgacggtaacgctcgagtgtcagcgttgcgggaagccgtttactcatcaggtctacacaacgtattgttttagtcctgtgcgtagtgacgaacaggctgaagcactgccggaagcgtatgaaccgattgaggttaacgaattcggtgaaatcgatctgcttgcaatggttgaagatgaaatcatcctcgccttgccggtagttccggtgcatgattctgaacactgtgaagtgtccgaagcggacatggtctttggtgaactgcctgaagaagcgcaaaagccaaacccatttgccgtattagccagcttaaagcgtaagtaattggtgctccccgttggatcggggataaaccgtaattgaggagtaaggtccatggccgtacaacagaataaaccaacccgttccaaacgtggcatgcgtcgttcccatgacgcgctgaccgcagtcaccagcctgtctgtagacaaaacttctggtgaaaaacacctgcgtcaccacatcactgccgacggttactaccgcggccgcaaggtcatcgctaagtaatcacgcatctgcgtgatgaagcttagtgaggattttccccaggcaactggggaaagaccaaaccgggcggcgacgataccttgacacgtctaaccctggcgttagatgtcatgggaggggattttggcccttccgtgacagtgcctgcagcattgcaggcactgaattctaatagccaactcactcttcttttagtcggcaattccgacgccatcacgccattacttgctaaagctgactttgaacaacgtagccgtctgcagattattcctgcgcagagtgttatcgccagtgatgcccggcctagccaagctatccgcgccagtcgtgggagtagtatgcgcgtggccctggagctggtgaaagaaggtcgagcgcaagcctgtgtcagtgccggtaataccggggcgctgatggggctggcaaaattattactcaagcccctggaggggattgagcgtccggcgctggtgacggtattaccacatcagcaaaagggcaaaacggtggtccttgacttaggggccaacgtcgattgtgacagcacaatgctggtgcaatttgccattatgggcagtgttctggctgaagaggtggtggaaattcccaatcctcgcgtggcgttgctcaatattggtgaagaagaagtaaagggtctcgacagtattcgggatgccagtgcggtgcttaaaacaatcccttctatcaattatatcggctatcttgaagccaatgagttgttaactggcaagacagatgtgctggtttgtgacggctttacaggaaatgtcacattaaagacgatggaaggtgttgtcaggatgttcctttctctgctgaaatctcagggtgaagggaaaaaacggagctggtggctactgttattaaagcgttggctacaaaagagcctgacgaggcgattcagtcacctcaaccccgaccagtataacggcgcctgtctgttaggattgcgcggcacggtgataaaaagtcatggtgcagccaatcagcgagcttttgcggtcgcgattgaacaggcagtgcaggcggtgcagcgacaagttcctcagcgaattgccgctcgcctggaatctgtatacccagctggttttgagctgctggacggtggcaaaagcggaactctgcggtaacaggacgctgccagcgaactcgcagtttgcaagtgacggtatataaccgaaaagtgactgagcgtacatgtatacgaagattattggtactggcagctatctgcccgaacaagtgcggacaaacgccgatttggaaaaaatggtggacacctctgacgagtggattgtcactcgtaccggtatccgcgaacgccacattgccgcgccaaacgaaaccgttagtaccatgggctttgaagcggcgacacgcgcaattgagatggcgggcattgagaaagaccagattggcctgatcgttgtggcaacgacttctgctacgcacgctttcccgagcgcagcttgtcagattcaaagcatgttgggcattaaaggttgcccggcatttgacgttgcagcagcctgcgcaggtttcacctatgcattaagcgtagccgatcaatacgtgaaatctggggcggtgaagtatgctctggtcgtcggttccgatgtactggcgcgcacctgcgatccaaccgatcgtgggactattattatttttggcgatggcgcgggcgctgcggtgctggctgcctctgaagagccgggaatcatttccacccatctgcatgccgacggtagttatggtgaattgctgacgctgccaaacgccgaccgcgtgaatccagagaatagtattcatctgacgatggcgggcaacgaagtcttcaaggttgcggtaacggaactggcgcacatcgttgatgagacgctggcggcgaataatcttgaccgttctcaactggactggctggttccgcatcaggctaacctgcgtattatcagtgcaacggcgaaaaaactcggtatgtctatggataatgtcgtggtgacgctggatcgccacggtaatacctctgcggcctctgtcccgtgcgcgctggatgaagctgtacgcgacgggcgcattaagccggggcagttggttctgcttgaagcctttggcggtggattcacctggggctccgcgctggttcgtttctaagataaggattaaaacatgacgcaatttgcatttgtgttccctggacagggttctcaaaccgttggaatgctggctgatatggcggcgagctatccaattgtcgaagaaacgtttgctgaagcttctgcggcgctgggctacgacctgtgggcgctgacccagcaggggccagctgaagaactgaataaaacctggcaaactcagcctgcgctgttgactgcatctgttgcgctgtatcgcgtatggcagcagcagggcggtaaagcaccggcaatgatggccggtcacagcctgggggaatactccgcgctggtttgcgctggtgtgattgatttcgctgatgcggtgcgtctggttgagatgcgcggcaagttcatgcaagaagccgtaccggaaggcacgggcgctatggcggcaatcatcggtctggatgatgcgtctattgcgaaagcgtgtgaagaagctgcagaaggtcaggtcgtttctccggtaaactttaactctccgggacaggtggttattgccggtcataaagaagcggttgagcgtgctggcgctgcctgtaaagcggcgggcgcaaaacgcgcgctgccgttaccagtgagcgtaccgtctcactgtgcgctgatgaaaccagcagccgacaaactggcagtagaattagcgaaaatcacctttaacgcaccaacagttcctgttgtgaataacgttgatgtgaaatgcgaaaccaatggtgatgccatccgtgacgcactggtacgtcagttgtataacccggttcagtggacgaagtctgttgagtacatggcagcgcaaggcgtagaacatctctatgaagtcggcccgggcaaagtgcttactggcctgacgaaacgcattgtcgacaccctgaccgccagcgcgctgaacgaacctagtgcgatggcagcggcgctcgagctttaaaagaggaaaatcatgaattttgaaggaaaaatcgcactggtaaccggtgcaagccgcggaattggccgcgcaattgctgaaacgctcgcagcccgtggcgcgaaagttattggcactgcgaccagtgaaaatggcgctcaggcgatcagtgattatttaggtgccaacggcaaaggtctgatgttgaatgtgaccgacccggcatctatcgaatctgttctggaaaaaattcgcgcagaatttggtgaagtggatatcctggtcaataatgccggtatcactcgtgataacctgttaatgcgaatgaaagatgaagagtggaacgatattatcgaaaccaaccttagttctgttttccgtctgagtaaagcggtaatgcgcgctatgatgaaaaagcgtcatggtcgtattatcactatcggttctgtggttggtaccatgggaaatggcggtcaggccaactacgctgcggcgaaagcgggcttgatcggcttcagtaaaagtctggcgcgcgaagttgcgagtcgcggtattactgtaaacgttgttgctccgggctttattgaaacggacatgacacgtgcgctgagcgatgaccagcgtgcgggtatcctggcgcaggttcctgcgggtcgcctcggcggcgcacaggaaatcgccaacgcggttgcattcctggcatccgacgaagcagcttacatcacgggtgaaactttgcatgtgaacggcgggatgtacatggtctgaccgcgatttgcacaaaatgctcatgttgcgcgcagtctgcgtggttatgagtaataattagtgcaaaatgatttgcgttattggggggtaaggcctcaaaataacgtaaaatcgtggtaagacctgccgggatttagttgcaaatttttcaacattttatacactacgaaaaccatcgcgaaagcgagttttgataggaaatttaagagtatgagcactatcgaagaacgcgttaagaaaattatcggcgaacagctgggcgttaagcaggaagaagttaccaacaatgcttctttcgttgaagacctgggcgcggattctcttgacaccgttgagctggtaatggctctggaagaagagtttgatactgagattccggacgaagaagctgagaaaatcaccaccgttcaggctgccattgattacatcaacggccaccaggcgtaagtgaacatctccaggcggtcgttcgaccgcctgagttttatctttttgtcccactagaatcattttttccctccctggaggacaaacgtgtctaagcgtcgtgtagttgtgaccggactgggcatgttgtctcctgtcggcaataccgtagagtctacctggaaagctctgcttgccggtcagagtggcatcagcctaatcgaccatttcgatactagcgcctatgcaacgaaatttgctggcttagtaaaggattttaactgtgaggacattatcagccgcaaagaacagcgcaagatggatgccttcattcaatatggaattgtcgctggcgttcaggccatgcaggattctggccttgaaataacggaagagaacgcaacccgcattggtgccgcaattggctccgggattggcggcctcggactgatcgaagaaaaccacacatctctgatgaacggtggtccacgtaagatcagtccattcttcgttccgagtacgattgtgaacatggtggcaggtcatctgactatcatgtatggcctgcgtggcccgagcatctctatcgcgactgcctgtacttccggcgtgcacaacattggccatgctgcgcgtattatcgcgtatggcgatgctgacgtgatggttgcaggtggcgcagagaaagccagtacgccgctgggcgttggtggttttggcgcggcacgtgcattatctacccgcaatgataacccgcaagcggcgagccgcccgtgggataaagagcgtgatggtttcgtactgggcgatggtgccggtatgctggtacttgaagagtacgaacacgcgaaaaaacgcggtgcgaaaatttacgctgaactcgtcggctttggtatgagcagcgatgcttatcatatgacgagtccgccagaaaatggcgcaggcgcagctctggcgatggcaaatgctctgcgtgatgcaggcattgaagcgagtcagattggctacgttaacgcgcacggtacttctacgccggctggcgataaagctgaagcgcaggcggtgaaaaccatcttcggtgaagctgcaagccgtgtgttggtaagctccacgaaatctatgaccggtcacctgttaggtgcggcgggtgcagtagaatctatctactccatcctggcgctgcgcgatcaggctgttccgccaaccatcaacctggataacccggatgaaggttgcgatctggatttcgtaccgcacgaagcgcgtcaggttagcggaatggaatacactctgtgtaactccttcggcttcggtggcactaatggttctttgatctttaaaaagatctaagttgtcattttccacccttataaaaggtccgcttgcgggccttttttcttagcttttattccgacttgttccgtagtgaacatgctgccacactaacaattctctgataaggagccggtatgttcttaattaacggtcataagcaggaaagcctggcagtaagcgatcgggcaacgcagtttggtgatggttgttttaccaccgccagagttatcgacggtaaagtcagtttgttaagcgcgcatatccagcgactacaggatgcttgtcagcggttgatgatttcctgtgacttctggcctcagcttgaacaagagatgaaaacgctggcagcagaacagcaaaatggtgtgctgaaagtcgtgatcagtcgcggtagtggcgggcgagggtacagcacattgaacagcggaccggcaacgcggattctctccgttacggcttatcctgcacattacgaccgtttgcgtaacgaggggattacgttggcgctaagcccggtgcggctggggcgcaatcctcatcttgcaggtattaaacatctcaatcgtcttgagcaagtattgattcgctctcatcttgagcagacaaacgctgatgaggcgctggtccttgacagcgaagggtgggttacggaatgctgtgcggctaatttgttctggcggaagggcaacgtagtttatacgccgcgactggatcaggcaggtgttaacggcattatgcgacaattctgtatccgtttgctggcacaatcctcttatcagcttgtcgaagtgcaagcctctctggaagagagcttgcaggcagatgagatggttatttgtaatgcgttaatgccagtgatgcccgtatgtgcctgtggcgatgtctcctttagcagtgcaacgttatatgaatatttagccccactttgtgagcgcccgaattaatcatgaaaaaagtgttattgataatcttgttattgctggtggtactgggtatcgccgctggtgtgggcgtctggaaggttcgccatcttgccgacagcaaattgcttatcaaagaagagacgatatttaccctgaagccagggaccggacgtctggcgctcggtgaacagctttatgccgataagatcatcaatcgtccacgggtttttcaatggctgctgcgtatcgaaccggatctttctcactttaaagccgggacttaccgctttacaccgcagatgaccgtgcgcgagatgctgaaattgctggaaagcggtaaagaagcacagttccctctgcgactggtagaagggatgcgtctgagcgattacctcaagcaattgcgtgaggccccgtatatcaagcatacgctgagcgatgataagtacgccaccgtagcgcaggcacttgaactggaaaacccggagtggattgaaggttggttctggccagacacctggatgtataccgccaataccaccgatgtcgcgttactcaagcgagcgcacaagaaaatggtgaaagcggtcgatagcgcctgggaagggcgtgcggacggtctgccttataaagataaaaaccagttggtgacgatggcaagtattatcgaaaaagaaaccgccgttgccagtgaacgcgataaggttgccagtgtatttatcaaccgtttacgcattggtatgcgcctgcagaccgacccgaccgtgatttacgggatgggagagcgttataatggcaaactttctcgtgcagacctggaaacgccgacagcgtataacacctataccattaccggtctgccgccaggtgcgatagcgacgccgggggcggatagcctgaaggctgctgcgcatccggcaaaaacgccgtatctctattttgtggccgatggtaaaggtggtcacacgtttaataccaatcttgccagtcataacaagtctgtgcaggattatctgaaagtgcttaaggaaaaaaatgcgcagtaagtatatcgtcattgaggggctggaaggcgcaggcaaaactaccgcgcgtaatgtggtggttgagacgctcgagcaactgggtatccgcgacatggttttcactcgggaacctggcggtacgcaacttgccgaaaagttaagaagcctggtgctggatatcaaaagcgtaggcgatgaagtcattaccgataaagccgaagttctgatgttttatgccgcgcgcgttcaactggtagaaacggtcatcaaaccagctctggctaacggcacctgggtgattggcgatcgccacgatctctccactcaggcgtatcagggcggcggacgtggtattgaccaacatatgctggcaacactgcgtgatgctgttctcggggattttcgccccgacttaacgctctatctcgatgttaccccggaagttggcttaaaacgcgcgcgtgcgcgcggcgagctggatcgtattgagcaagaatctttcgatttctttaatcgcacccgcgcccgctatctggaactggcagcacaagataaaagcattcataccattgatgccacccagccgctggaggccgtgatggatgcaatccgcactaccgtgacccactgggtgaaggagttggacgcatgagatggtatccatggttacgacctgatttcgaaaaactggtagccagctatcaggccggaagaggtcaccatgcgctactcattcaggcgttaccgggcatgggcgatgatgctttaatctacgccctgagccgttatttactctgccaacaaccgcagggccacaaaagttgcggtcactgtcgtggatgtcagttgatgcaggctggcacgcatcccgattactacaccctggctcccgaaaaaggaaaaaatacgctgggcgttgatgcggtacgtgaggtcaccgaaaagctgaatgagcacgcacgcttaggtggtgcgaaagtcgtttgggtaaccgatgctgccttactaaccgacgccgcggctaacgcattgctgaaaacgcttgaagagccaccagcagaaacttggtttttcctggctacccgcgagcctgaacgtttactggcaacattacgtagtcgttgtcggttacattaccttgcgccgccgccggaacagtacgccgtgacctggcttagtcgcgaagtgacaatgagtcaggatgcattacttgccgcattgcgcttaagcgccggtagccctggcgcggcactggcgttgtttcagggagataactggcaggctcgtgaaacattgtgtcaggcgttggcatatagcgtgccaagcggcgactggtatagcctgctagcggcccttaatcatgaacaagctccggcgcgtttacactggctggcaacgttgctgatggatgcgctaaaacgccatcatggtgctgcgcaggtgaccaatgttgatgtgccgggcctggtcgccgaactggcaaaccatctttctcccagccgcctgcaggctatactgggggatgtttgccacattcgtgaacagttaatgtctgttacaggcatcaaccgcgagcttctcatcaccgatcttttactgcgtattgagcattacctgcaaccgggcgttgtgctaccggttcctcatctttaagagagacatcatgtttttagtcgacagtcactgccatctcgatggtctggattatgaatctttgcataaggacgtggatgacgttctggcgaaagccgccgcacgcgatgtgaaattttgtctggcagtcgccacaacattaccgggttatttacatatgcgggatctggtaggcgaacgtgacaacgtcgtattttcttgtggcgtgcatccactcaaccagaatgatccctacgatgtagaagatttacgccgtctggcggcagaagagggtgttgtagcgctgggtgaaaccgggctggattattattacacgccggaaactaaagtacgtcagcaagagtccttcatccatcatatccagattggtcgtgaactgaacaagccggttatcgtccatacccgtgacgcccgtgccgatacgctggcaattctgcgcgaagaaaaagtgacggattgcggtggcgtactacactgttttacagaggacagagaaacggcgggtaaattactggatctcggattttacatctccttttccggcattgtgaccttccgtaatgcggagcaactgcgcgatgctgcgcgttatgtccccctggatcggttactggtggaaactgacagtccttaccttgcgccggtaccgcatcgaggaaaagagaatcaacctgcgatggttcgtgacgttgcagaatacatggctgtgttgaaaggtgttgccgttgaagaactggcgcaggtaaccaccgataacttcgcccgtctgtttcacatcgacgcttcccgccttcaatccatccgttgaatgagtttttttaaagctcgtaattaatggctaaaacgagtaaagttcaccgccgaaaattgggcggtgaataaccacgtttgaaatattgtgacatatgttttgtcaaaatgtgcaacttctccaatgatctgaagttgaaacgtgatagccgtcaaacaaattggcactgaattattttactctgtgtaataaataaagggcgcttagatgccctgtacacggcgaggctctccccccttgccacgcgtgagaacgtaaaaaaagcacccatactcaggagcactctcaattatgtttaagaatgcatttgctaacctgcaaaaggtcggtaaaagcctgatgctgccggtatccgtactgcctatcgcaggtattctgctgggcgtcggttccgcgaatttcagctggctgcccgccgttgtaagccatgttatggcagaagcaggcggttccgtctttgcaaacatgccactgatttttgcgatcggtgtcgccctcggctttaccaataacgatggcgtatccgcgctggccgcagttgttgcctatggcatcatggttaaaaccatggccgtggttgcgccactggtactgcatttacctgctgaagaaatcgcctctaaacacctggcggatactggcgtactcggagggattatctccggtgcgatcgcagcgtacatgtttaaccgtttctaccgtattaagctgcctgagtatcttggcttctttgccggtaaacgctttgtgccgatcatttctggcctggctgccatctttactggcgttgtgctgtccttcatttggccgccgattggttctgcaatccagaccttctctcagtgggctgcttaccagaacccggtagttgcgtttggcatttacggtttcatcgaacgttgcctggtaccgtttggtctgcaccacatctggaacgtacctttccagatgcagattggtgaatacaccaacgcagcaggtcaggttttccacggcgacattccgcgttatatggcgggtgacccgactgcgggtaaactgtctggtggcttcctgttcaaaatgtacggtctgccagctgccgcaattgctatctggcactctgctaaaccagaaaaccgcgcgaaagtgggcggtattatgatctccgcggcgctgaccagcttcctgaccggtatcaccgagccgatcgagttctccttcatgttcgttgcgccgatcctgtacatcatccacgcgattctggcaggcctggcattcccaatctgtattcttctggggatgcgtgacggtacgagcttcagccacggtctgatcgacttcatcgttctgtctggtaacagcagcaaactgtggctgttcccgatcgtcggtatcggttatgcgattgtttactacaccatcttccgcgtgctgattaaagcactggatctgaaaacgccgggtcgtgaagacgcgactgaagatgcaaaagcgacaggtaccagcgaaatggcaccggctctggttgctgcatttggtggtaaagaaaacattactaacctcgacgcatgtattacccgtctgcgcgtcagcgttgctgatgtgtctaaagtggatcaggccggcctgaagaaactgggcgcagcgggcgtagtggttgctggttctggtgttcaggcgattttcggtactaaatccgataacctgaaaaccgagatggatgagtacatccgtaaccactaatccgtaagacgttggggagactaaggcagccagatggctgccttttttacaggtgttattcagaattgatacgtgccggtaatgctgaaattacgcggtgtgccgtagacgatagaaccttccacgttggtatcgtaggttttgtcgaacaggttattgacgttcccctgtaagctgaagtttttcgtcacctggtagcgggtgaagagatccaccagcgcgtagctaccttgctcggcgcggaaggtgccatacggcgtcacggtgtcggtatacacgcgattttgccagttaacaccaccgccgaccgtcaactctggcatgacaggcaaccgatagctggtgaacattttaaccgtggtgcgtggcagattaggattaacggcgtttccttcgttatcctctgcaatatagcgcgttgcgccaaatgtcagctgccagttgtcggtaattgcgccgttgagttcaaattccacccctttactgactgtcccatccaccgctttataggcggtttcgccgttgctgccggggataggtgtaccggtggactgagcgacattatcctgctcaatacggaagatggctaacgtggtggtcagacggctattcatccagtcgcttttcagacccagctcgtagttgttaccggtgattggagccagatatttgccactactgtcacgatcattttgcggctggaaaatagaggtatagctggcgtaggtgctccagttgtcattgatgtcaaacaccagaccagcgtaaggcgtggtgtggtttttctccatgctgtaagtcagcgtatcaacccgccagttggtataacgtgcgccgaggatcagatgcagcggatcggcaagggtgacacgagtggcagcatataagcttttcatatgtgtggtatcgtcctgcgccaggctctgtggactccagtcggtttgtgggaaattgccattaaagttgtagaaactgccaatttcatccgggaagatgttggcccaactactgaagtaacgattgttttgtttgctgtaactgccaccaaacattagattgtgctgacgaccaaacaattcataactaccgtcagcgaacaaatccagcgcatcaactttacgtttgccactgttccaaccggtgccgccgacataatcaaagccaggtccataattactgtatggcccaaccagcataccatccgctttgtttacataggcatcgacatacatcattttgctgtcaaattcgacttcagagtgggtggcattcagtgtcgcttgccaggtatcagcaaactgctgcttcagggtcataaagaccttgttgatctctttatcgttgtacgcccagtcaggtgcggtactgcgtgcgcgatcgtaactgttgctgctgccatcagtattccagcgcggtaaaccgccccaggtagggctattaacatcaatgcgctgatattcgtaaccggcactaagcgtcgtaagatcgcctaaatcagcatcgacaatgccgctgaagaaggtcttttcactgttgtagcggtccagccaactgtcgttattctggtagccgccgacaattcgcgcgcggattttaccgtcttcggtgagtgggctttgtaaatccgccacataccgttctttgttccagctaccgtattccgcgctgacatcgcctttaaattcacgactggtcgcgtgttttcgaaccatattaattgccgcagatggattacccgtcccggtcatgagtcctgtcgcgccacgcactacttctacgcgttcaaagagtgccatatcagaaagtgcgtcgcccagattccagcggctttcaaaataggtggggataccatcaaccatatagttatcgatctggaatccgcgggaataataaagagcacgatcggaatccgcctgacttttgctgatccccagcgtgttttccatcacttcgcccagcgtttgtaactgctgatcttccatccgctgctggctaacaatagtgacgctctgaggaatatcacgttgagtcatctgcattttggtacccgcagaggtagacgttacgctgtaatcattttcgccatcatctggagctgtggcactaccctcaacaatcaccgtttcttcagtggctggtgcagcaaaagcggcagaaggtaatagtgccagtgctatgcaaccggcaagtagactcggtttggtgatggcttgatattgattatccctgttaaattgtgtactaagcatttgaaatctcttggtttatgttgtcgtcaggctcatgccggaggagggtgatgagcgattatatttagtgtgcgaataattttgtttgtaaatgcaaatgagaaatatacgcattcatatttgtcatgtaaaccaaacagagaatgtcttttcagcgcattcgcaggcagaaatgggaataatggcgatatatacggcagcaaaacgattttttgcttaagaaatcgtgagttaaggttgaaagagcaggtttaactcgaccatactctatactcgcagtgtggcgcggcgtagcatggcgcaacgcatggctatttgaaaaaggaaaatgtcgtggcagaagaaactatattcagcaaaattattcgtcgtgagatcccctccgatatcgtctaccaggatgatctggtaacggcgtttcgcgatattagcccgcaagcgccaacgcatattctgatcattccgaatatcctcattccgactgtgaacgacgtcagtgctgagcatgagcaggcgctgggacgcatgatcaccgtagcggcaaaaattgctgagcaagaaggtattgccgaagatggctatcgtctgatcatgaataccaaccgccatggcggacaagaggtttaccacatccatatgcacttgttgggtggccgtccgctgggaccaatgctggcgcataaaggtctgtaacgatgagaaaaggatgctttgggctggtgtctctggtgttgttactgctggtgggctgtcgtagtcatccggaaattccggtgaatgatgagcaaagcctggtgatggagagttctttattggctgcgggcatcagtgcagaaaagcccttccttagcacgtctgatattcaacctagtgcatccagtacgctttataacgaaaggcaagaacccgttaccgttcattatcgtttttactggtatgacgccagagggctggagatgcatcctctggaaaggccacgcagcgttaccattcccgcacatagcgcggtaacgctgtacggcagcgccaattttctgggggcgcacaaagtcagactttatctatatttgtaaggggtgaatcttgatgacaaaaatgagtcgctacgccttgattaccgcgctggcgatgtttctcgccgggtgtgtggggcaacgtgaacctgcaccggtagaagaagtgaaaccagcgccggaacaaccagccgagccacaacagcctgtccccacagtgcccagcgtgccgacgatcccgcagcagccaggcccaattgagcacgaagatcaaactgcaccgcctgcgccgcatattcgccattatgactggaatggcacaatgcagccgatggtcagtaagatgcttggggctgacggggtgactgcgggtagcgtcctgctggttgatagcgttaacaaccgtactaacggtagcctgaatgccgcagaagcgaccgaaacgctgcgaaatgcgctggctaataacgggaaatttaccctggtttccgcccagcaactgagcatggcgaagcaacagttaggtttgagcccgcaggacagtttaggcacccgtagtaaagccataggcattgcccgcaatgtcggcgctcattacgtgctgtactccagcgcctctggcaacgttaacgctccgaccctacaaatgcagctgatgctggtgcagacgggcgaaattatctggagtggtaaaggtgccgttagccagcaataagtaaaattatctggtcaggtaaaggtgccgtttcgcagcaataatcccatcacgcgcgacgaattgctgagccgctttttcccgcagtatcatcccgtcacgacgtttaatagtgggcttagtggcgggagttttctcattgaacatcagggccagcgttttgttgtgcgtcagccgcacgatcctgatgcgccgcagtccgcgttcttgcgccagtatcgggctttaagtcaactacccgcatgcattgcaccgaagccgcatttatatctccgtgactggatggtagtcgactatctgcccggcgcggtaaaaacgtatttgccggataccaacgaactggcaggcttgctgtattatctacatcaacaaccacgttttggctggcgaataacgctgttgccgttactggaactgtactggcagcaaagcgatccggcgcggcggacagtgggttggctgcgaatgttaaaacgtctgcgcaaagcgcgggaaccacggcctttacgcttaagtccattgcatatggatgtccacgccggaaatttagtgcatagcgcgagtgggttaaaactcatcgactgggagtatgccggagatggtgatatcgcgctggaactggcggcggtgtgggtggaaaatactgaacagcaccggcaattggtcaatgactatgccactcgcgcgaagatttatccggcgcaattatggcgtcaggtcaggcgatggtttccctggctgctgatgctcaaagcagggtggtttgagtaccgctggcgacaaaccggcgatcaacaatttatcaggctggccgatgacacctggcggcagctattaataaaacaataaggagagcagtgtgggtccagtaatgttggatgtcgaaggttacgaactggacgcggaagagcgtgaaatactggcgcatccgctggtgggagggctgattctctttacgcgtaactatcatgatcctgcccagttacgtgaactggtgcgccagatccgcgcagctagccgcaatcgtctggtggtggcggttgatcaggaaggtggacgcgtgcagcgttttcgtgaaggttttacccgcttgccagcggcgcaaagtttcgctgcgctgagtggaatggaagagggtggcaaactggcgcaggaggcaggttggttgatggccagcgaaatgatcgctatggatattgatatcagctttgcgcctgtgctggatgtcgggcatatcagcgcggcgattggcgagcgttcttatcatgccgatccacaaaaagccctggcaattgccagccggtttattgatggtatgcatgaagccggaatgaaaacgaccgggaaacacttcccaggacacggtgcagtaacggcagacagtcacaaagaaacaccgtgcgatccacgtccacaagcggagattcgcgctaaagatatgagcgtcttcagttccttaatccgcgaaaataaactcgacgccattatgcctgcgcatgtgatctacagtgatgttgatccgcgtccggcgagcggttctccctactggctgaaaaccgttttgcgtcaggaactgggttttgacggcgtgattttctctgacgatttaagcatggaaggtgccgcgattatgggcagttatgccgaacgcgggcaggctagtctggatgcgggttgcgatatgatcctggtctgcaataatcgtaaaggggccgtcagcgtgttagataatctgagtccgatcaaggcagaacgtgttacacgtttgtatcataaaggtagttttagccgacaggaactgatggacagcgctcgctggaaagcgatcagcacccgtctgaatcagttacatgaacgctggcaggaagagaaagcaggtcactaaccctggcttatgtgaggaagcgatgattatctatttacacggttttgactctaacagtccgggtaaccacgagaaagtcttacaattgcagtttattgacccggatgtacgcttgataagctacagtacgcggcatccgaaacatgatatgcagcatctgcttaaagaagtggacaaaatgttgcaactgaacgttgacgagcgtccgctaatttgcggcgttggcttgggcggatactgggcggaacggattggttttctttgcgacatccgccaggtgatcttcaaccctaatttgttcccttatgagaacatggaaggcaagattgatcgcccggaagagtatgccgatattgccactaagtgtgtgaccaacttccgtgagaagaatcgcgatcgttgcctggtgattttgagccgtaatgatgaagcgcttaacagccagcggacatctgaagagttgcatcattattacgagattgtctgggacgaagagcagacgcacaaattcaagaatatctccccgcatttacagcgcattaaagcgttcaaaaccctcgggtaaatgccctcgtcgcatcaggtaaccttgccggtacctgatgcgctccgaattctgtgggtcggataaggcgtccacgccgcatccgacagtcgagcatcaatgcctgatgcgcttcttatcaggcctaccgaacgccctgcatacacccctcactctatatcactctcacaaattcgctcaaataataaacaataaactctgttttttgatctcacccggtaaagtcgcctatcttttcagcaacaaaacttgattaacatcaattttggtatgaccaatgcaccattcatgttattctcaatagcgaagaacattttcattgctgtaacctgttgttaattaagagctatgttaataaccattaattaacaattggttaataaatttaagggggtcacgttgactacgccattgaaaaagattgtgattgtcggcggcggtgctggtgggctggaaatggcaacacagctggggcataagctgggacgcaagaaaaaagccaaaattacgctggtcgatcgtaaccacagccacctgtggaaaccgctgctgcacgaagtggcgactggcagccttgatgaaggcgtcgatgcgttgagctatctggcccatgcgcgcaatcatggtttccagttccagctgggttccgtcattgatattgatcgtgaagcgaaaacaatcactattgcagaactgcgcgacgagaaaggtgaactgctggttccggaacgtaaaatcgcctatgacaccctggtaatggcgctgggtagcacctctaacgatttcaatacgccaggtgtcaaagagaactgcattttcctcgataacccgcaccaggcgcgtcgcttccaccaggagatgctgaatttgttcctgaaatactccgccaacctgggcgcgaatggcaaagtgaacattgcgattgtcggcggcggcgcgacgggtgtagaactctccgctgaattgcacaacgcggtcaagcaactgcacagctacggttacaaaggcctgaccaacgaagccctgaacgtaacgctggtagaagcgggagaacgtattttgcctgcgttaccgccacgtatctctgctgcggcccacaacgagctaacgaaacttggcgttcgcgtgctgacgcaaaccatggtcaccagtgctgatgaaggcggcctgcacactaaagatggcgaatatattgaggctgatctgatggtatgggcagccgggatcaaagcgccagacttcctgaaagatatcggtggtcttgaaactaaccgtatcaaccagctggtggtggaaccgacgctgcaaaccacccgcgatccagacatttacgctattggcgactgcgcgagttgcccgcgtccggaagggggctttgttccgccgcgtgctcaggctgcacaccagatggcgacttgcgcaatgaacaacattctggcgcagatgaacggtaagccgctgaaaaattatcagtataaagatcatggtagcctggtaagcctgagcaacttctccaccgtcggtagcctgatgggtaacctgacgcgcggcagtatgatgattgaaggacgaattgcgcgctttgtatatatcagcctataccgaatgcatcagattgcgctgcatggttactttaaaaccggattaatgatgctggtggggagtattaaccgcgttatccgtccgcgtttgaagttgcattaatcgacgtacactggcggatgtggcataaacgcctcatccgcccttgaggaacagcgcgatcggcagccgcgttgtatcaggcatcctttcagactcctccgaatccttaagtatttccagccattcccgcgcttttcatcttctgtctgatagctgcttttctccttcgcttgcatgattggcataactgcaaagaaggaggtgttcccgtgaataaaagtatgttggcgggtatcgggattggtgtcgcagctgcgctgggcgtagcggcagtggccagtctgaacgtgtttgaacggggcccgcaatacgctcaggttgtttctgcaaccccaatcaaggaaacggttaaaacaccgcgtcaggagtgtcgcaacgtcacagtgacccatcgtcgaccggtgcaggatgaaaatcgcattaccgggagcgtgctcggcgctgttgctggcggcgtgatagggcatcagtttggtggtggtcgcggtaaagatgtcgccactgttgtgggggcgctgggtggtggatatgccggtaaccagatccagggctctctccaggaaagcgatacttacacgactacgcaacagcgttgtaaaacggtgtatgacaagagtgaaaaaatgctcggttatgatgtgacctataagattggcgatcagcagggcaaaatccgcatggaccgcgatccgggtacgcagatcccgctagatagcaacgggcaactgattttgaataacaaagtataacaaggctgtactctgcaatttggcccctcattcgctcaggctgaggggctttttttgcgacttatttcaccagttcgggccataaacgcaaagtcgttccggcaatctgcatcagtttttccaggcttgcaccttcgcgtgcgctgatgctcatcccctgaataatacaattaaggaattctgccagatgtgtcacgtcacagtggggcgggatttccccgcgcgcttgtcgttgacataaaaactgctgcaaagtgcgctcttgcatcgcatggcgacttttcaacgtattggcgatatctccactatctggggagagggtggtgcagttgttgatcatgaagcagcctgccggggtgtctttgctggtaaagcagttggcgatggcagcaaaatagtcagccagcgcagactccacgcttttctcttcacaaaacagctgtgcttcatgcttagcggcaaaacgatcgatatagcggtcgagaacggcacgaaataacccctctttgttggtaaattccgcgtatagcgtgggcgctttggctccggtcgcttcgacgaggtccgcaagagaagtcgcttcataaccgtgttgccagaacaatttcatggccttatcaagcgcggcatccctgtcgaacacttttgggcggccacggcttttttttacacattgtgtactgtcagttgccatgatgccgttgtacctggtgactgtgaatgaaaggttattataaaaataatcacctccgttcaccagtccagatcccataaaaataattgctttctatttaactgaaatttaaagatttttaaattaattaatgattgttataaaaaatatcttgtatgtgatccagatcacatctatcatttagttatcgatcgttaagtaattgcttgcgacgtcattcatctgcataaggccactattatgaaaaacgtaaaaaccctcatcgctgcggcgattttaagctccatgagttttgccagctttgcggctgtcgaagttcagagtacgccagaaggccaacaaaaagtcggtacaatcagtgctaacgcggggacaaatctgggaagcctggaagagcagctggcgcaaaaagcggatgagatgggcgcaaaatctttccgtattacttctgtaaccggtccgaataccctccatggaacagcagtaatttataaataagcattaaccctcattaatgcctgctactgctgattttttccccgcgacatgccgtgtcgcggggatttttttatccgggctttacagcgtttgtgggctcacttgatgacggcggacatccaccggcatcccggaacggacatccatcacatgttgcatcacttcagcgtcagtttgtgctgcatctttaaaactttgcattgcgctattcagcgtaattggcagcagctgcggatcgtcatcaatcttctcactcagcggctgatgtacttcaaccagacgcgcaccgtttggttcggcagagacttttatcggagtgttgatgatattcactttggtgcctggggtgacctggctaaagagtgttttgatatcgtcatcccgcagacgaatacagccagaacttacccgcatgccaatgccgaaatcggcgttcgtaccatgaagcaaataaacgccgccataggccgccagacgaatcgcatgatggcccattgggttatccagtccagccggcactaccgcaggcaactcaattccctgtgctttataacgggcgcggatgtttgccgttggcgtccaggttgggtttgcacgtttgtcactaacggtggtcaccattgtcggtgtcagcgtgtcaccacctaactgaccaatacctattggatacacggttacgctatttttacccggcgggtagtaatagagacgcagctccgcaatgttgatcacaatgccttcgcgcggcgcatctggaagtagggtttgcaacgggatcgttaacacgctgcccgcgcgcggtacgtaaggatcaacgccggggttagcctgtaacagagcgagaaagccgacgttgtattttttggcgatggcttccagagaaccaccgtcattttccaccacatgaaatttgttttcgccaaccagacgactgcccgctggcggcagcggccaggtgttggcttttgccggtagcgccagcgccacggcagcggcgaacgtaaaaaacgttagccagcgagaaaaacgcgttttgatcatcaccaaaaatccataataaatataaggttattgtaataaacagataagcctgaattatggatggtgacagtgtcggatagtgcagggaagtgcaaagaatttgtaaatgttgcagatgggggcgcagaaacgcccccgatttaccattaagcgatcgcgttctcttccagttcacgcataaactggcgtacccattcgatacgcgttttccgctcactcaaatcctgaataaatttcaggcgcgtcggaccatcaaggcggtaatgctgcggctgtttttgcagcaaaccaatcaaccaggccggattaacgtgattcttctcggcaaattcgatcaccccgcctttctcattaccttccagcttcctgatccccagtttctgcgcttgctggcgcagacgggcaatatccagcagggtacgcgccggatctggcagcaggccgaagcgatcgataagctcgactttgatctcttccagttcgttttccgttttggcgctggcaatacgtttgtagaagctcagacgcgtgttcacgtcagggatgaaatcatctggcaataggctcggcatccgcagctcgacttctgtttgctggctggtgagatcttccaggctcggctcgcgtccggctttcagtgcatcgacggcgttttccagcaactccatatacaggctgaaaccgatggtttccatactgccgctttgttcttcgccaagcagttcacccgcgccgcgaatctccagatcgtgcgttgccagcgcaaaacctgccccgagatcttccaggctggcaattgcttcaagacgtttttgtgcatcggtagtcatcgcttttggatgcggtgtcagcaaccatgcatatgcctgatgatggctacgtccgacgcgaccgcgtaactggtgcagctgcgccagaccgaagtgatccgcgcgttcaatgataatagtgttggctgtcgggatgtcgatcccggtttcgataatggttgtacaaaccagcacgttgaaacgttgatgatggaaatcattcatcacccgttccagttcgcgctcgcgcatctgcccgtgaccgatggcgatccgcgcttctggcaccagttctgccagccgttcggcggctttctgaatgttttccacatcattgtagagataataaacctgtcctccgcgcaaaatttcacgcaggatcgcctcccggaccaccatgctgtcatactcacggacaaaggttttaactgccagacgacgggcgggcggcgtggcgataatgctcaggtcacgcattccgctcattgccatattcagcgtacgtgggatcggcgttgcagtaagcgtcagaatatccacgttcgcgcgcatcgctttaatgcgctctttatgacgcaccccgaagcggtgttcttcatcgacaatcagcaggcctaaatctttaaacttgacgtcactttgcagcagtttgtgcgtaccgatcagaatatcgattttcccttccgccacttccgcaaggatttgcgtctgctctttggcgctgcggaaacgggagatcatttcgatacgtaccggccagttggcgaaacggtcgcggaagttgtcgtaatgctgctgcgcgagaagggtggtaggcaccagcaccgccacctgcttgtggttatctactgccaggaaagctgcgcgcatcgccacttctgttttaccaaagccaacatcgccgcacaccagacgatccattgccagcggctgacacatgtcgctaagtaccgcattaatggcctgcgcctgatccggcgtggtttcaaacgggaagctgtcgcagaacaactgatactgctcacgatcgtgtttaaacgcgaagccctctttggcggcgcgttgcgcgtagatatccagcaattccgccgccacatcacgcactttttccgccgctttctgccgcgcgcgactccacgcatcgccgccaagtttatgcagcggggcgttttcttccgcgccacctgcgtaacggctaatcagatgcagactgctcaccggaacatacagtttggcgtcgttggcataggtgagcatcagatactcgccagtaatgccacccgcttccagcgtggtcattccggcataacgaccgacgccgtgctccagatggaccaccggctgaccaatatgcagttccgcaaggttacggatcagtgtatcggggttgatggtgcggcgagaatcctgacgacgacgggcaacgcgttcaccgagcagatcgctttcgcaaatcagcgccagattacgcaccgtatcgacaaaaccatgttcggcagcgccaatcatcagataacgcccacggtcgctggcttcatcaagacgcataatgcgttgcggagcaattttaattcgtgcgagcagttcacccagcgcttcacggcgaccttcactttctacgctgaacaccaccggaccgtcgaaagtctcgaggaacttacgcagcgcatccagcggcgctttttgttgtgcctgaacggccaggtctggcagtttctggaaacctaaattggcattcgcggcttttgtcggtaaatgttcagtttttagctgcacccggggccagtttttcagctcactgaagagctcgtccacccgcagccagaggctttgtggtggcaacagcgggcgcatcggatcgacgccgcgattctcaaaacgcgccagcgtgtcagcctggaaacgttcggcactggtttccagatcgccagtattcacgagcaaggtattggcagggaaataactgaacagcggcggcagtggttcgctgaagaacaatggctgccagtactcgatcccggcaggtaatgtgcctttactcacttgctggtaaatatgttctggatcgcgcttcacttcgaaggtatcgcgccactggctgcggaacagttcaattgccgctttatcggtcggaaattcgtgcgcgggcagcagattgatcgcttctacttcctccagcgtgcgctggctgtcgacgtcaaacacccgcaggctgtcgatttcatcatcaaagaaatcaagacgataaggcagctcactccccatcgggaagagatccagcaacgcgccgcgcgtggcgtattcgccgtgctccatcacctggtcaacatggcgataaccggcgctgtccagttgggttcgtaatgcatctcgactcaggcgctgaccttttttcatcaccagcgcatgaccgtggagaaaactgtgtgggcaaacgcgctgcataagcgtattcaccggaacaatcagtacgccacgctgcatcgtcggtagctggtaaagggtggaaaggcggctggagataatgtcctgatgagggctaaaactgtcgtagggaagagtttcccagtccgccagattcatcaccatttgatcggtaaactggctgatttcatcatgcaaacgcagagcattttgcatatctggtgcaatgagtaccaccggaccggcgtgacgttcggcaatttccgctaccagcgttgcacaggctgcgccggttaactcgcccagcagacgctgctcacccgctttgacgggcagcgtataacgatattgttcaggcataacggttgtcagattctcgttaggatatgcctcaacatatgggggcatatctctgataagcaatgctgttcattatccgtaatcgacatggtttagcaaattgaatcgccccggctggggcgatggcttagcgggagtaactgacggcagcgggcagactaggcggggagaacaacagatcgctgaatgcacgctgactaagttttcttaccagcaagcccgcaacagtacagatgaacaaactgacaaagggataaaccagcaggagtgtcagttcgacttgcgggctccagcgtgctgcgttcatttgcgcaagcagagttaagctgaatatttcaaccagaatgcgatgggtggtgtagatagcaatggtgttggagccaatcacattcagcaggctggtggagcgcataccgaatcgttgctcgtattgataaaacagcttcatgatcaccacaatgcttaccaggctcaacagcaggctgatagtaaacaaccaggcaccgaccgccagaacggtaagcaaagaagccatcagcagatggcggcgcaacggcacctctttaacacaggtcattattgttgcgccaaaccatgcgccaaggctgtaataaggcaaattgcggatcacactgttcattccccaccacggcgtgggaacgaaattaaccgccacactcagcagtacaaacaaggcgaatagtggcagcgccagacggctaaaaattttacataccacgaaatagacaattaacgcatacagataccacaagctggtgctggcggtgatcatcccgtgcaggaactcaccggtggaatcggcataagcggcattggaggcattgcttaaatcgcgctcaggtgccagccactggttcagcgcacttaacgccagccactgcaccacgccccaaagcgccagcacccagaagatgttccagatccgtttatcgagacaatttccccacggtacgctgtcgatatagcggcgaatcaaatagccggatataaagaaaaaaaccggcatacgaaagggggcaaggtaaagattgaaatagatccagcatttgctcaggacttcgcttaacggatgctgaaaagtggtcagatgcggataaaaggtaatgacgctgtgataaatcaccaccagacaaatacataaccctttgatctggttaatccatagctctttttgtttcatcaggacaacacgctcttttttaatttacatgcggttgatcctgcgggttatgacccgaggtgtaatgggtatctgtctgtattggatgatttttcagattaagatcaggcggcaagattgatgataaaacatggcaatttagccgattgatttacgggggcttttcagattagccctgacgatcacttacagttcagacgtttacccatcttgctttcgcttatatactcgtgtctttgctacagcaaccagacggatttcatgtaccaacctgtcgctctatttattggcctgcgttacatgcgtgggcgtgcagcggatcgcttcggtcgtttcgtctcctggctttctaccatcggcattaccctcggggtgatggcgctggtcacagtattgagtgtgatgaacggctttgagcgcgagctgcaaaacaacatccttggcctgatgccacaggcaattctctcttctgagcatggctctcttaacccgcagcaactcccagaaacggcagtcaaactggacggcgttaatcgcgtcgcacctattactaccggtgatgtggtactgcaaagcgcgcgcagcgtggcggtcggggtgatgctcggtatcgacccggcgcaaaaagatccacttacaccgtatctggtcaatgtgaaacaaactgacctcgagccggggaaatataatgtcatcctcggcgaacaacttgccagtcagctaggcgttaatcgcggtgatcaaatccgcgtgatggtaccatctgccagccagttcacgccgatggggcgtattccaagccagcgcctgttcaatgtgattggcactttcgccgccaacagtgaagtcgatggctatgaaatgctggtgaatattgaggatgccagccgtctgatgcgttatccggcaggcaatattaccggctggcgtttgtggctggatgagccgctgaaagtcgacagtttaagtcagcaaaaactgcctgaaggcagcaaatggcaggactggcgtgatcgtaaaggcgagttgttccaggccgtacgcatggaaaaaaatatgatgggtttactgctgagcctgattgtcgccgttgcggcgtttaacattattaccagtctagggctgatggtaatggagaagcagggcgaagtagcgatcctgcaaacgcaaggcttaactccgcgacaaatcatgatggtctttatggtgcaaggggccagcgccgggattatcggtgcgatcctcggagcggcgcttggcgccctgcttgccagccagttaaataatctgatgccgataatcggcgtcctgcttgatggcgcggcgctgccggtggctatcgaacctttacaggtcattgttattgcgctggtggcgatggctatcgcgctgctgtctacgctttaccctagttggcgcgctgccgccactcaacccgctgaggctttacgttatgaataagatcctgttgcaatgcgacaacctgtgcaaacgctatcaggaaggcagtgtgcaaaccgatgtgctgcacaatgtcagtttcagcgtcggcgaaggtgaaatgatggcgatcgtcggtagctctggttccggtaaaagtaccttgctgcacctgctgggcgggctggatacgccaacctccggcgatgtgatttttaatggtcagccaatgagcaaactgagcagcgcagcgaaagctgaactgcgcaaccagaagctgggctttatttatcagtttcaccacctgctgccggattttaccgccctggaaaacgtggctatgccgctgctgattggcaagaaaaagcccgctgaaatcaacagccgtgcacttgagatgttaaaagcggtggggctggatcatcgtgcgaatcaccgcccatctgaactttctggcggcgaacgccagcgtgtggcgattgcccgtgcgctggtgaataacccgcgcctggtactggcggatgaacctaccggtaacctcgatgcgcgtaacgccgacagcatcttccagttgcttggggaattgaatcgcttgcagggcaccgccttcctggtggttactcacgacctgcaactggcgaaacgtatgagccgccagttagaaatgcgtgatggtcgtctgacggcggaactgagcctgatgggggcggagtaatggcgatgcctttaagcttattaattggcctgcgttttagtcgcggacggcggcgcggcggcatggtgagcctgatctccgttatttctaccattggcattgccctcggcgtggcggtattgatcgtcggcttaagcgcgatgaacggctttgaacgcgaactgaacaaccgtattctggcggtggtgccgcatggtgaaatcgaggcggtggatcagccgtggactaactggcaggaagcactggatcacgtgcaaaaagtgccgggtattgccgctgccgcgccgtatatcaatttcaccgggctggtggaaagtggcgcgaatcttcgcgcaatccaggtgaagggcgttaacccgcaacaggaacagcgtctgagcgcattacccagctttgtccagggcgatgcgtggcgcaattttaaagcgggcgaacagcaaattatcatcggcaaaggcgtggcggatgcgctgaaagtgaagcagggggattgggtgagcattatgatccccaacagcaatcccgagcataaactgatgcagccaaaacgtgtgcgtttgcacgttgccggtattttgcagttgagtggtcaactcgatcacagttttgccatgatcccgctggcggatgcccaacaatatcttgatatgggttccagcgtgagtggtattgcccttaaaatgacggatgttttcaacgccaataagctggtacgcgatgcgggtgaagtgaccaacagctatgtttatattaaaagctggattggtacttacggctatatgtatcgcgatatccaaatgatccgcgccattatgtatctggcgatggtactggtgattggcgtggcctgtttcaacatcgtctccaccttagtgatggcggtgaaagacaagagtggcgatatcgcagtattaagaacgctgggggcgaaagatggtttaattcgcgccatctttgtctggtatggattgctggcagggctgttcggcagcctgtgtggtgtgattatcggcgtagtggttagtctgcaacttaccccgattattgagtggattgaaaagttgatcggtcatcagttcctctccagcgatatctattttattgatttcctgccaagcgaattgcactggctggacgtcttctacgtactggtcacagcattgttgctgagtcttttggcaagttggtatccggcgcggcgcgccagtaatattgaccctgcgcgagtccttagcggccagtaaaggcagtacattaaaacaaggagcggcaatgtattacgggtttgatattggtggaacaaaaattgcgcttggcgtgtttgatagcggtcggcagttgcagtgggaaaagcgggtgccgacaccgcgtgacagctatgacgcatttttagatgcagtgtgtgagctggtagctgaagctgaccaacgttttggctgtaaaggttctgtcggcatcggtattccgggaatgccggaaacagaagatggtacgctgtatgccgccaatgtccccgctgccagcggtaaaccgctgcgtgccgacctgagcgcacgtcttgatcgcgatgtacgccttgataacgatgccaactgttttgcccttagtgaagcctgggatgatgaatttactcaatatccactggtgatggggttgattctcggcaccggtgttggcggcgggctgattttcaacggcaaaccgattaccggtaaaagctacattaccggcgagtttggccatatgcgtctgccggttgatgcgttaaccatgatggggttggatttcccgttacgccgctgcggctgtggtcagcatggctgcattgaaaattatctgtctggtcgcggttttgcgtggctgtatcaacactattatcatcaaccgttgcaggctcccgaaattattgcgctttatgatcaaggcgatgagcaggcaagggcgcacgttgagcgttatctggatttattagcggtttgtctgggaaatatcctgaccatcgttgaccctgacctggtcgtcattggtggtggcttaagcaatttcccggcaatcacaacgcaactggcggacaggctgcctcgtcatctcttacctgtagctcgtgttccgcgcattgaacgcgcgcgccacggtgatgcgggaggaatgcgtggtgcggccttcctacatctaaccgattaaacaacagaggttgctatgctgagccgtcggggtcatcggttaagtcgttttcgtaaaaataaacgccgcctgcgcgagcgtttgcgtcagcgtatttttttcagagataaagtggtgccggaagcaatggaaaaaccaagagtactcgtactgacaggggcaggaatttctgcggaaagtggtattcgtacctttcgcgccgcagatggcctgtgggaagaacatcgggttgaagatgtggcaacgccggaaggtttcgatcgcgatcctgaactggtgcaagcgttttataacgcccgtcgtcgacagctgcagcagccagaaattcagcctaacgccgcgcatcttgcgctggctaaactgcaagacgccctcggcgatcgctttttgctggtgacgcagaatatcgacaacctgcatgaacgcgcaggtaataccaatgtgattcatatgcatggggaactgctgaaagtgcgttgtagtcaaagtggtcaggttctcgactggacaggagacgttaccccagaagataaatgccattgttgccagtttccggcacccttgcgcccgcacgtagtgtggtttggcgaaatgccactcggcatggatgaaatttatatggcgttgagcatggccgatattttcattgccattggcacatccgggcatgtttatccggcggctgggtttgttcacgaagcgaaactgcatggcgcgcacaccgtggaactgaatcttgaaccgagtcaggttggtaatgaatttgccgagaaatattacggcccggcaagccaggtggcgcctgagtttgttgaaaagttgctgaagggattaaaagcgggaagcattgcctgatgcactacgcttatcaggcctgcaaggggacgcaattaattgaatttgcgggttttgtgggccggataaggcgttcgcgccccatccggaataatacacgcgcacttttccggcctcttttatcgtttactcgtcaataacaatgcggcaataaacgtacagacaccaattagccctgcccagagtgggcttattctggtaatcgcaaagctattatcgatatacaaacataaagcctgataacccatattggcaatagtcatcgccactgcaaattttaacgcataaataaaacgagtcgtgtagtaaaagatcctggaaaataagataaacgtcgcagcccaggcgataaaacctaatgtgttggtgctgccggggggagcattttcatgctgttgtcctggatgcggataatacgttagtggcggcgtgctttgttttaatatctgtgcttgtagaacagccaatgcattattgattccctgataccagagatctgcatttaaataagccagcgtgtgattttctatcagaaggccgagatgtttatcgtccagaccactttcaacctggccgttggtgatcataattaaccgtggttcgcgggtagtaaatagtaacagaacacttccttttacatcactcaaactagaactcgcatgcgccagcatcgctttaccattttgtctgagactggcttcattattaatgtcgggtaaaaccacaataaacggtgcaattcccgtttgttggcgaaaaagctcggctttatgcgcgatctcttcagcatctggtacagtaccggtaacgtccgtaaaaagtgtcttcattattggaattaatggcttgctggctgctgtcagaggcaggagtatcagtaaactgagcagtataatgaattttttcatgggcgggacttccgtttcctgcgactttttttagaggagggcatacttattaataaaccgacggcgataaaaataacgcccataatgccgataaacccccatttaaaaaaattaacccacgggttatttatctcagccttttcaggatgcccgggagaataataaacattaactttatcgccttcgctgtcttcataaaaatcgctgccgatactgctattgaaaattagcgtgtaatctggcgtcggtcgaaaggcaacgacgggataccagctaccatctttacccgtgcgatgagaatgactggagtgccagacggtatcaacaatgacgccttcggtatgaatcgcgtctttgctataggtgaactggttataaaagacaacaacagaaatgaggatcagtaccagaccgataccgaggaatatacgaaagaaaactttactgtcctgactcattagccacatccttgctaactaaaaaacgggcggtaataccaccgcccgcttgctgaattaacgtcctgctttcagcttctgataatactcttcataaatgctgctggctgcgccaacgtcattctgccattcgccatttttaatggtttcagcatccgggtagagtgttttatcgttcgccacttctggacttaacagcttacgcgccgcaaggtttggcgttggataaccgatagtttcagcaacctgttttgccacatccgggcgcagcaggaagttgatcaatttcagcgcgccttctttgtttttggcatttgccgggatcgccaggctgtccatccagaaaatgccgccttctttcggccacaccacgtcaattggcgtacccgcctggcgtgcaacgaaagcagaaccgttccagatcatgccgaggttaacttcgccttccatgtacgggttcgccgggttatcggagttaaaggctgccacgtttggcatcagttttttcagctcgttatatgcagcttcaatctctttcggatcggtggtgttaccggagtagcccagcttacgcagcgccatctggaacacttcacgggcatcgtcggtcaacagcaggctgcctttgtactctggcttccacagatcggcccagctggtgacagatttcggatccaccgcatcaccgttaacaccaatcgccgtcgcaccccagatatacggaatggagtagtcgttattcgggtcaaaaggcttgttgagcatgtctggatcgagattgctgaagtttgttaacttgctcttgtcgatcttctggatcatcccttctttacgcattttatcaacgtaataggtactaggaaccaccagatcataggcaccgtctttgtatgttttcagcttggcgtacatggtttcgttgctctcgtaagtgctatagataaccttaataccggtttctttggtgaactgttcaagcagtcctggcggcacgtactcggtccagttgtagaaatacagcgtgttgttgtcatcggcgtgagcggcgctcatgcccagtgccagagcacccgccgcgagcaggtggcgactccattttttcatttaacgtcccctgtgttacctttcgttttatcacgagcaataagctggctggcaataaccatcaccaggctcagcaccagtaatatggttgccagcgcgttaacttccgggcttacgccgactttgaccatgctataaatttttaacggcagaatttcataacttggtccggtgacgaagctagaaactaccacatcgtccatgctcagggtaaagcttaacacccagcccgccgccaccgctggcattgccagtggcagaatgatttttcgcagaatggtaaattcgctggcaccgagatctttcgccgcttccagcattcgcacgtcaaaacctttcaggcggctatacaccgtcaccaccacaaatggcaggcagaaggtgatatggctgaacagcaggctccagaagccaagctgaatacccagcagcataaacagcaccagcaggctaatcgccatcacgatatctggactcatcatcaccacaaacagcattccgctaacgaacggcttaccacgaaagcgataacggtacagcgcaactgccgtcagactaccgataagcgtagcaaacgtcgcgctaaacaccgccattgttagactatgctgcgctgcctgtaacaggctgtcgttgttcatcagcaggctataccatttggtggtaaagccctgccagttgatgccaaagcggctgctgttaaaggagttcacaatcaaaataatgattgggatatacaggtacgcgtagatagcggtcataaaaccgccgcgaagcagtcgaccgatcattcgagttccaccttcttattcagcaaacgagaagcgcgccagtaaaccagcaacatcaggcccattacgatagtcagcgtaatgctggtagctgcaccaaacggccagtcacgaatattaaggaactggaccttgatgacgttaccgatcagcaggtttttcgcaccgcccatcaggtcggatacatagaacaggcccatcgctggcagcatcaccagcagacatccggcaataattcccggcatcgtcagtggaataatgatacggataaaagtctgtaacttgctggcaccgagatcgcgcgccgcctcaagcaacggcttatccagtttttcgatactggagtacagcggcatcaccataaacggcagcagaatgtaaaccagaccgataatcaccgcactgggcgtgaacatgatacggattggtgtgtcgataacgcccagccagagcaaaaactcgttgagatagcctttggtgctgaggaaaattttcagcccgtagatacgaattaaactgttggtccagaacggaacaatcagcagaaacagcagcagcggacgcaccttgtgtggcaacttcgccagaaaccaggcaaacgggtagcccagcaccaggcaggcgagggtggcgatcagcgccatattcaggctgtgcaatagcacttcaaaatagagcggatcgagcagacgcgtgtagttatccagcgtaaagaccattttgacaaaactggcgtcgtcgcgggtcaaaaagctggtgccaatgatcatcaggttgggcagaaagacaaacaacacaagccaaccgacaatagtgacaatcactacattctggaacttacttgtgttcttcatcagccagtacgacctcccagctttctacccaattaatggccattttttggtcgagagagtggtcaaagtcaggatcgtcttcattgaagaattcgctgaccatcaccatcttgccattttccagttcaacaacgctctccagcgtcatgcctttgtagttacgctcgcgaacgtaaccaatcagcccttcagcgtggttgtcgtcgttaatctcttcaacacgtaagtcttccgggcgcagcagaacatgcagtttttgccccggttcaacggcgaagttaacgtagatattacattcgcggccttcaacgttggcgcgtacgcgctgctcgtctagacgttcgatgacagtggcgttaaacatattgatttcgccaatgaagccggcaacaaacaggtttttcggctcttcgtagatttcacgcggcgtgccgtcttgctcaatgcgaccatcgcgcatcaccacaatcctgtcactcatggtgagtgcttcttcctggtcgtgagtcacaaagacgaatgtaatgccaagcttacgctgtaacgctttcagctcgttctgcatttgcttacgcagtttgtaatccagcgcactgaggctctcatccagcaacaacagacgaggcttgttaaccaccgcgcgagcaatggcgacgcgttgctgttgaccaccagagagctgatgcggtttgcgttgagcgaaggtttccaactgcaccatccgcagggcttccatcacgcggggcgtaatttcagcagcgggggttttttgcatgcgcaacccaaaggccacattttcgaacacggtcatgtgggggaaaagtgcgtagctttggaaaacagtgttcacatagcggttttccgccggaacgtgggtgatgtcctcgttatccagcatgatgcgtccggaatcaacagtttccagacctgcaatcaggcgaagaacggttgttttaccgcagccagaagggccaagcagcgtgaggaactcgccattgttgatagtcagatccagctggggaatgacctctttaccatcaaagcatttgcgaattcccgccaattgcaccagcggactaaggctactcggttgtttattcaattttttactctgtcccatgtaaacgcaacggatggcttaccgatgcggggtttgtggttaaccaccttggtgactcttaatgagggcggtaattctacggcaaaccgcttgaatcgccaatctttgttgtgaattactggcttagctttatattcattaaggtaatgctgataaatattcccgcttgcaggggtaaaagtgacctgacgcaatatttgtcttttcttgcttcttaataatgttgtcacaaaaagtgagggtgactacatggataaactacttgagcgatttttgaactacgtgtctctggatacccaaagtaaagcaggggtgagacaggttcccagcacggaaggccaatggaagttattgcatctgctgaaagagcagctcgaagagatggggcttatcaatgtgaccttaagtgagaagggcactttgatggcgacgttaccggctaacgtccctggcgatatcccggcgattggctttatttctcatgtggataccagtccggattgcagcggcaaaaatgtgaatccgcaaattgttgaaaactatcgcggtggcgatattgcgctgggtatcggcgatgaagttttaagtccggttatgttcccggtgctgcatcagctactgggtcagacgctgattaccaccgatggtaaaaccttgttaggtgccgatgacaaagcaggtattgcagaaatcatgaccgcgctggcggtattgcaacagaaaaaaattccgcatggtgatattcgcgtcgcctttaccccggatgaagaagtgggcaaaggggcgaaacattttgatgttgacgccttcgatgcccgctgggcttacactgttgatggtggtggcgtaggcgaactggagtttgaaaacttcaacgccgcgagcgtcaatatcaaaattgtcggtaacaatgttcatccgggcacggcgaaaggagtgatggtaaatgcgctgagcctggcggcacgtattcatgcggaagttccggcggatgaaagcccggaaatgacagaaggctatgaaggtttctatcatctggcgagcatgaaaggcaccgttgaacgggccgatatgcactacatcatccgtgatttcgaccgtaaacagtttgaagcgcgtaaacgtaaaatgatggagatcgccaaaaaagtgggcaaagggttacatcctgattgctacattgaactggtgattgaagacagttactacaatatgcgcgagaaagtggttgagcatccgcatattctcgatatcgcccagcaggcgatgcgcgattgcgatattgaaccggaactgaaaccgatccgcggtggtaccgacggcgcgcagttgagctttatgggattaccgtgcccgaacctgttcactggcggttacaactatcatggtaagcatgagtttgtgactctggaaggtatggaaaaagcggtgcaggtgatcgtccgtattgccgagttaacggcgcaacggaagtaagcgaaaagggatgcggcatgtgatgccgcatccggcttaaatccaaacttacccttcgaagaaccaatacccgctattgaccagcgccgcgagcatcgcgaggaaactcggatcttccagcgcatcgccaaaattctccgcagtcagcgcaatgttgctggcgagtgcatccagtgccggacggtgcggggaatcgatcttctcaccattggcatacacgtcgtcgccaatgcgcaatacgcgcagaccacccaggcgcaccagcacttcaccttgtttcagcgcatcgtagatttcatccggctgataaggcggctctggcggcgcgatatccagttcatgacgactctgggatataaactcgccaaaccattgcttaaagtgttccggctggttgatcaattcgagcatcatctcacgcagtttatccatctcttgcggcagaacatccgcaggatgagcgcgaggtggaacatccggatcgctgtagtagttgccgcccagttcacgttgcagcacataatcggcaaatccactaatcagttcccgcgtatttggcgcgcgaaagcccacggaatagttcatcgcattttccagcgcgtagccttcatgcgggaatcctggcggaatataaagaatatcaccaggctccagctcttcatcgatgatggcttcgaacggatcgacctgtaacagatccggatgtgggcagtgctgtttcatttgcagcttttcgcccactcgccagcgacgacgtccggtaccctgaatgataaacacgtcgtactgatcgagatgcgggccgacgccgccgccgggtacagaaaaagaaatcatcagatcatcaatacgccagtccggtagttcacggaacggtcgcatcagcgcggcggtcggctcatgccagtggttcactgcctgtaccagtaaactccagttggtttcaccgagatgatcgtagctttcgaacgggccgtggctgacctgccatttgccatcctggtgactgaccagtcgactgtcaacttcgctttccatcgccagacccgccaactcgtctggagagatcgggtcaataaaattattaaagccgcgttttaacaccaccgggcgtttctgccagtgacgttcaagaaaatcgggccagttaagagtgagttggtattccatgttaagcatccacaggctggtatctgcaaccgattataacggatgcttaacgtaatgcgtgaagtatgggcatatttattcatctttcggcgcagaatgctggcgaccaaaaatcacctccatccgcgcaccgcccagcatgctctctccggcgacgattttaccctcatattgctcggtgatttcgcgggctaccgccagccctacaccttgcccagggcgtaaagtatcaacccgttgaccacggtcgaaaatgacctctcgcttgcttaatggaataccggggccatcatcctcgaccacaatatagagatgctcgtcggtttgccttgcagaaatttcgacaaactcgaggcaatatttacaggcattatccagcacgttgcccatcacctcgacaaaatcgttctgctcaccgacaaagctgatctctgggctaatatcgagagagatattgacccctttgcgttgatacactttgttcagcgcactggtgagattgtccagcagtggggcgaccggatgcagctcgcggctgagcaatgtcccgccgcgcatactggcacgatgcaggtagtagccaatttgctgactaatgcggctgatttgctccagcattaccggctcagcatcactgacgctcatcttttcactacgcagagaacgcagcgtactttgcagcaccgccagtggcgttttcagactatgggtcaggtcggtgagcgtcgtacggtatttgtcgtaacgttcgcgttcactttttaacaatcggttcaggtttcgtaccagactggtcagttctcgcgttgtggctggattgagcaattcgcggttatgttcttccagttcgcggacttcttttgccagggcttcgatggggcgtaaactccaccaggcggcgacccacagcagcgggatcactaacagcagattggcactgagcacatagataaaccagctccagaccatataggaactttttagctccaccggaatggtatccaccaccacaatggttaattttggcatccggcttgttgccgggtagacgtttactgccacgctgtgggtcatctccgcgtcgtcatcatcttcccgcacttcctgcaactgttgctgtatgctatgatctccactcagcaagaggctggtatcgttaacatccgcttcaatttcatgaaaaccattgcttttcagccagtcaggctggatcatcttcatcagccagggcacgtcacgttgcgcccataaaagctgcccgttctcatcataaattagcgtcatggtggggctttgcttgtcgatattttcgggtaactcgacatgcaacttattgttttcccacttcgcaagggtatagaacagattgctctcgccacgtaacagccgaaacgtagttttatcgaaactgacgctataaccgatcagcgcgaccattccgtaggcaaggctaagcaccagtactaccgctgccgttgccaacagaaaacgtacccgcaggctgagcgggaaaaaaagacgcagtaattttttcatcagcgcaattcgaacagatagccctggccgcgaacggtggtaatcacttcttggggatattgtgcctgaatttttttgcgcagacgtcccatcagtacatcaatggtatggctttcccgcagctccgcatccggatagagttggagcattaagctatctttgctgaccactttgccattattgcgtatcaacgtttccataatagtgtattcgaacgcggtcagtttgatcacttcgtcattaatagataattcacggcgagagagatcaacctgaaacggggggaggctaatgacctgactagccagaccgctattacgccgcattaatgcctgcattcgcgccatcacctcttcaatatgaaacggtttagtcacataatcatcagcaccggcacttaatacttcgactttgtcctgccagctttcacgggcggttaataccagaatcggcagactaacatcgttgctacgccagcggcgaatcagactcagaccgtcctcgtctggcaatccgagatcgacaatcgcaatatccggtatatgttcattgagataataatcggcttctttggcatcttctgcgtcatcgacctgatgaccagcatcctgaatctgaactttaaggtggtgacgtaacaacgcattgtcttcaacaaccagtacgcgcatttttatttctccctgtcttaattattaaaatagtgtaacgcgattatgtggttatgggggtaaacattaaataaaccagcggggaggggaggtaaagtgaaaaaataaaaagcggataatcttaataagcaggccggacagcatcgccatccggcactgatacgaggtttatttcagctcatcaaccatcgtgatagctcgaccaatatagttagccggcgtcatcgctttcaggcgggctttctcttcttctggcaacgccagaccatcgataaactgcttcatgccttcggcgtcaacgcgcttaccgcgagtcagctctttcagcttctcgtacggtttttcgatgccatagcgacgcataactgtctggattggttcagccagcacttcccagttgtgatccagttcatccagcagatggtcacggttcacttccagtttgctcacgcctttcagggtggattgatatgcaatcaaggcataaccgatacccacgccgaggttacgcagcacggtagagtcggtcaggtcacgctgccagcgggaaaccggcagtttgcttgccagatgctgcaataccgcgttggaaaggcccagattcccttcggagttttcgaagtcgatcgggttaactttatgcggcatggtggaagaaccaatctcaccagcaatggttttctgtttgaagtggttaagggcgatataaccccagacgtcacggtcaaagtcgatcagaatagtgttgaagcgcgcaacgcaatcaaacagttcggcaatgtagtcgtgcggttcgatctgggtggtgtacgggttccactgaatacccaggctggtgacgaactcttcgctgaactgatgccagtcaacttccgggtaagcggcgatgtgggcgttatagttaccgaccgcgccgttgattttgccgaggatctccacctggttaagctggcggtactggcgctccatacggtaggcgacgtttgccatctctttaccgatggtactcggcgtggctggctgaccgtgggtacgagacagcagcgggatatcgcgatactgaacggcgagatctttaatgccatcaatcagttgacgccagtatggcaggatcacttcatcacgcgcggttttcagcattaatgcgtgggagaggttattgatatcttcgctagtacaggcaaagtggatgaattcagaaaccgcgtgcagttccgggatctccgccactttttctttcaggaaatactcaaccgctttaacgtcgtggttagtggtacgctcgatagttttgatgcgcgccgcatcttcttcgctgaaactggcgacgattgcatcaaggtaaccgattgcgtcggcagcaaaagcaggaacttccttgatcgctgcgtgcgcggccagtttttgcagccaacgtacttcaacttgtacacggaatttcagcaaaccatattcgctgaaaatcccgcgcagcgcgctgactttatcgccgtagcgtccatcgacaggggaaacggcggtcagactggataattccatagatcacaactccggggttaaatgagcaagaatttgttttgcctgagtggtcaggcgattacgagaaaacatcagttgcagacgtccgccgccgacctggtgccagagcacggcggcgcgaatgcctgccagcagggttgcgcgaactttcgcctgcacttgtgggctttgcagtacagcaggggaaccggtgacctgaatgcgcgggccaagcgggctaatcacatcaacatagatagcagccatcgcgctcatcagcgtttcggactgtaaatcgaagtgttcgagctggcgttgcaggccgttgatccggttgcccagagtgtcgagcgcgcctttcgcactggagagtttgcgctcaagcaccatcaagctgagtgtgtagcgggttaattcggcgtttaagccctggcgactgctggcattgagcacgccgagcagggtttccagcccgacgcgcaggttggcttcgctaccgccaaaaaccgccagcgtgctgctggggttcatatcaataatactgttgagactgacgtgtagcgcatcggcatcacaatgcccctggtgagcgagttgttgcaccaggcgtgcgctctgacaaataccggccagggcgagggtgatgtcatagtaattctttgccacgttcactgcttccttgttttaagtaaagataataatcagaccggcagcggcagacgctgctcaataataccgccaccgaggcacacttcaccgttatagaagacggcagactggcccggcgtcacggcggcaaccggttcatcgaaaatcacttcaatgcgatcatcgtccagcgccttgacggtgcaagggatatcggtctggcgatagcgggtttttaccgtgcaacgcatagtgccggtgaatggttcgcgatcgacccagtgcaactgctgggcaatcaacccgacagacatcagccgcgggtgttcatggccctgagcgacaaccagaatgttgttttcgacgtctttgtccaccacataccacggttcttcggtaccttctttggtgccaccgatacccagacctttacgctgaccgagagtgtgatacatcagcccctggtgctcaccaatttcatcgccatcgacggtaatgattttgcccggttgcgccgggagataacggcccaggaactcgcggaatttacgttcgccaatgaagcaaatgccggtagagtcttttttcttcgcggtgaccagaccaagatcttcagcaatcttacgcacctgcggtttttccagttcgccgaccgggaacaggctttgcgcaatctgctcatggctgagcgtataaaggaagtagctctggtctttattgctgtccagaccacgcagcaggcggctcttgccatcgacatcggcccgacgtacgtaatgaccggtagcgatataatcggcacctaaatcttcggcggcaaattcgaggaaggctttaaatttgatctctttgttgcacagaatatccggattcggcgtgcgaccggctttatattcggcaaggaacagttcgaagacgttgtcccagtactcggcagcaaagttaacggtgtgcagttcaatgccgagcttgtcgcagacagcctgggcatcagccagatccgctgccgctgtgcaatattcctcaccgtcgtcttcttcccagttcttcataaacaggccttcgacctgatatccctgttgttgcaacagccaggcagaaacggaggaatcgacaccgccggacatgccgacgattactttttttgcggtttcagacattggatcactcacgacattgaacttcaaggcggcgtattctatcacgcagccttttagatgacaccctttgtaaaaggccagttaaaatcgccaatcatctccagcggataacgttgcccgctttgataacaacgaatactttccgccaccagcgggctacgaagattactcgcctgtaaaatttcttcggcgctgacccaacggcagcagtcgatatcgctgtcatgaggctgggtcgggcatatttgctcaagctcaatggcaaagaggaaacgcaaaaacggcgttttatctggcgcaatccactgatgcatacgaataaagtgttgcggctgcgcgctgatgccggtttcttcccacagttcacgggcggcggcttccactaaggtttcatcggcttccagatgcccggcaggttggttccataacgctttaccattaatcgtctcttcaacgactaaaaatttgccttctgcgtgcaccacgcaagcaacggtaacgtgcggtttaaacattttgcatccttaatctgtcacttctcgccattcaccattggcaagattatccaaagagtaatcacccatcgcatagcgaatcagtcgcagcgtggggaagccaacatgggcggtcatgcggcgcacctggcgattacgtccttcatataaggtgatcttcagccagctggtgggaatacttttgcgttcacgaattggtggattccgcggccataaccacgcgggttcgtcaaccagctccgcgccggcgggcagggtagggccatcatttaaggttacgccattgcgcaaggcttcaagtgcgtcttgtgtgggaataccttccacctgcacataatagatttttccggtgcgtttacccggctgggttaaacgcgcctgcaacgcgccgttattggtcagcaccagcaacccttcgctatcgcggtcaaggcgacctgctgcataaacaccctgaaccgggatgaattcttttaatgttttgcgtccggcttcatcggtgaactgcggaagaacatcgtagggtttattgaacaggatcacacgcgtgggctggttttcaggtttacgcctggtagaacgttggctgctgaatcgcttaacctggtgatttctaaaagaagttttttgcatggtattttcagagattatgaattgccgcattatagcctaataacgcgcatctttcatgacggcaaacaatagggtagtattgacaagccaattacaaatcattaacaaaaaattgctctaaagcatccgtatcgcaggacgcaaacgcatatgcaacgtggtggcagacgagcaaaccagtagcgctcgaaggagaggtgaatggaaagtaaagtagttgttccggcacaaggcaagaagatcaccctgcaaaacggcaaactcaacgttcctgaaaatccgattatcccttacattgaaggtgatggaatcggtgtagatgtaaccccagccatgctgaaagtggtcgacgctgcagtcgagaaagcctataaaggcgagcgtaaaatctcctggatggaaatttacaccggtgaaaaatccacacaggtttatggtcaggacgtctggctgcctgctgaaactcttgatctgattcgtgaatatcgcgttgccattaaaggtccgctgaccactccggttggtggcggtattcgctctctgaacgttgccctgcgccaggaactggatctctacatctgcctgcgtccggtacgttactatcagggcactccaagcccggttaaacaccctgaactgaccgatatggttatcttccgtgaaaacagcgaagacatttatgcgggtatcgaatggaaagcagactctgccgacgccgagaaagtgattaaattcctgcgtgaagagatgggggtgaagaaaattcgcttcccggaacattgtggtatcggtattaagccgtgtagcgaagaaggcaccaaacgtctggttcgtgcagcgatcgaatacgcaattgctaacgatcgtgactctgtgactctggtgcacaaaggcaacatcatgaagttcaccgaaggagcgtttaaagactggggctaccagctggcgcgtgaagagtttggcggtgaactgatcgacggtggcccgtggctgaaagttaaaaacccgaacactggcaaagagatcgtcattaaagacgtgattgctgatgcattcctgcaacagatcctgctgcgtccggctgaatatgatgttatcgcctgtatgaacctgaacggtgactacatttctgacgccctggcagcgcaggttggcggtatcggtatcgcccctggtgcaaacatcggtgacgaatgcgccctgtttgaagccacccacggtactgcgccgaaatatgccggtcaggacaaagtaaatcctggctctattattctctccgctgagatgatgctgcgccacatgggttggaccgaagcggctgacttaattgttaaaggtatggaaggcgcaatcaacgcgaaaaccgtaacctatgacttcgagcgtctgatggatggcgctaaactgctgaaatgtagtgagtttggtgacgcgatcatcgaaaacatgtaatgccgtagtttgttaaatttattaacgggagcgtaacgctcccgttgttttttgttaggctgctaacggttatcaaaattttatcaaaaaaagttatcaaaacccctcggtagttttggggtaggctggccggtcaggtggtagttctactactagtctcccacatagatattccttagctttttattattgctggcggacgctcgttaatatttaaggtcttcattgattaagacatccccaaagttagttatgtattcactgttattaggacaattatgaattaccactccttacacccgctcaaatattgttaaattgccggttttgtatcaactactcacccgggactcgccaggggacagccaacaggcattgggtgcaatcaccttagcgttcaggtacatgcggaatgtaaaaaaggccgcgagcgcggccccttcacatacatctttagtactgagactgtttaacctagggaattattatcgtattatattgcattacaactcccaacagtgacatatgaacttcctgctttactccacgactttaatatttcaaggccatgtgaagaacatatttcttgcactgcgagttcatcgagtaatccatagtaagaaacactttttgaatttttgtaaatgtatccgtaaagatgttttcttcctgtttcgtattttttgaagtatgagcttttatattgatttacaataagagtctcacctcctgattttagtaatctcttgatgctaagaactatcagataattcaaagcgtggctgtgatgataggaattatgttttttacgtgaatgagaataatcttaaatgaggaataactcattgattgacaatatttttattcaagaagtgtcattgactgttaacgcaatgttgtaaaggtaagataatctgatttatcaatattattgtgtgatttttatgtgagcagaagatattcatcagcaacgattacattagtcattttattttgccgacggcctcattgtcgaaagataagcgtacgacagtattatcagaaaagagtgattttttatccaactacacttcagcgcactgcgtgtaaaaaatgcctctttcttatgcgggatatcatcatttcatcatgatgtctttggtgagcggtgaacacaatgcacctgcgctgtctcttcaggatgaatcccctggtctggtgcctgcgggctgatgttgcagcagagcttaggagtcttagacgctactatcatttatccaatggcatggaaagcaaaagtgtcgatacccgcagtatatatcgtgaactgggtgcaacgctgagttacaacatgcgcctggggaacggtatggaaatgaaccctggctgaaggcggctgtgcgcaaagaatttgtcgatgataaccgggtgaaggtgaataatgacggtaatttcgtcaatgatttgagcggcagacgtggaatataccaggcagctattaaagccagtttcagcagtacgtttagcggacatctcggggtggggtatagccatggtgccggtgtggaatccccgtggaacgcggtggctggtgtgaactggagcttctgaccatcaacgattaaactgcgcttcggcgcagttttcgtttacaggatgttgaaagggaaaattctggggcaaaaaaagcccgccagttacggcgggaaacctcatcctatgggagaacaatgaataatgaaattgcggggttatcatctcccagtatatccatactaacaataaggttatttactcaaccaggcataaacattttgttttgtgcgtgggaacagccttaaggtgtaaagggggaggtggaaatagcaatgaggagtatcagcaagaatactcgccgctttaccacaacgtggatgagagggatgaaaaactcaaggcagagataactctgccttgaagataaatgcgcttttacagcgggcttatttcagctcttctgcttccggtaaggtcacgttcagctcaagaatagaaatatcgccatctttttgctcaagctgtacggttaccatctcaggatcaatttgtacgtatttacaaatgacctcaagaatatctttacgcaactgcggcagataatgcggttctgcatcgctgcgacggcgttcagcaacaataatctgcagccgttcttttgcaatgttggctgtgtttttcttccggctgagaaagaaatcgagtaatgccataacttatcctccgaacaagcgtttgaggaagcctttcttctcttcttcaatgaagcggaaaggacgttcttctcccaacagacgttctacggtatctgcgtaggctttacccgcatcggcgttaatgtcgagaatgaccggttcaccctggttagaggcgcgcaatacactttgatcctctgggatcacgccgacgagtttgatgcgcaggatctccagcacatcttccatgctcagcatgtcacctctgcttacgcggcctgggttatagcgcgttaacagcaggtgctctttaataggctcttcgccattttctgcgcggcgacttttgctcgccagaatgcctaaaatacggtcagagtcgcgtacactggagacttccgggttggtggtaataatggcttcgtctgcaaaatagagtgccattaacgcaccggtttcaatccctgccggggagtcacaaacgataaattcaaaatccatcgctttcagatcatcaagaactttggcgaccccttcacgggtgagggcatctttatcgcgtgtttggcttgccggcagaatatagagattttcagtacgcttatctttaattaacgcctgatttagcgttgcatcgccctgaatgacgttgacgaaatcgtaaacgacccggcgttcacaacccataatcaggtcgagattacgcaggccgatatcaaaatctatcacgacagttttctttcccttctgggccaaaccagtggcgatggccgcgctggaggttgtcttaccaacaccccctttgccgctagtaacaacaataatgcgtgccatagaaattccttgttaaaaagggatcaatttaacggttgaacggtcaaagcgttttcgactaactgcagtcgcgccgctttgccataaaattctgctgggatttgatcactcagccagtattcacctgcgatggacaccagttccgccatcaggttcgtacaaaatatttgcgtttcccggtcaccacttgcccctgccagcgcacgaccgcgcatcatgccatagacatgaatgttcccatcggcaatcaattcggccccagcgctaacgtggcttgtaacaatcagatcacattgtggagcataaatacgctgaccggaacgcaccggggtatctattaaacgcgtttttgtgaccggcgttgtattttgcgctggagcctgcggtgtgggagctggacgtggcgctttttcctttccttccgtcaggataggcagccccatcttttcaatttcggctttaagttgcgcatctttgcagccacttacgccaataacccgcaaaccggttgcgctaaccgccttatgcatcgcactccagtttaccgggtcttccagtgcactgacgttgagtacaacgggggcatgttttaaaaatgcgggggcctgagcgattttgtcttccagcgcctgatggataaccttaggttctgcctcatgcagatgaaccacagataaagtgaagctactgcctttaagctcgattggcgtgttactcatcctggccttactcaattagctattaatcatcgccagcgcgcgatgatgttccgaagactataaggcatgttatagtctggattatattgaggcaagtcaccctcccatttattcagagtaaaagtctattctgtgataaatggcgctgattcatagcttaaaaaatacccttgtcaatcaacccattgccgtcgtacttttgattgttcttatttacgcttcctttttccgcaccctaatcgtgacagcatctccagacctgtttaaatatccagtattgaggcaagtgtattttttcaccacgccaggctttcttaactttccattttttgcggcatcattaaagaacagatacccgttatcttaatatccgccacagaattgctctatcatagaaaccgcagaagacgtctgatacttctgtcaggtcatcgtaactcgtccaggtcagcggttttgattacggattgatgatgaaatgagcataagtgttgtacggttggattatcaggatgtgctatgaatatgatgcgtattttttatatcggattgagtggtgtggggatgatgttcagtagtatggcgtctggaaatgacgctggcggacttcaatctccggcgtgcggcgttgtttgcgacccgtatatttgtgtgaacagtgatggcatttccccagagttaacaaggaaatatctcggcgaaaaagccgctgaaaacttacaaagtttacaaggctacgatcccagcgaatttacattcgctaacggtgtattttgcgatgttaaagaaaaattatgtcgtgatgatcgttattttggtgtggatggtaagcggagtggaaaaatcaatcaaaccaccacaaagatgttatttatgtgtcgtgagtgatgtcttgtttacattatgttctattcgtcattaacctcttgagcgacagagaggagtggggcattaacgtttatgacggggagagtccccgtcggttgacatttacttaatttgaatatcgacgttatattttttagttttgtttttacgggcgtcgtttcgggtttgcaacactcgcagctcatatttgccagaagcagggagactgtattgtccgtgactatcgagttctggggaatatctggataaatcaacactatcatcgattcctggcccgaagaggtaagtatcagcgccttcattagagatactcacatgcactttctgaccttttttggcatagaaggtatatgtatcgtaatcgtatccctttatttcgccggagtactgagcgctgctatggccttttctgaactcaacattgacattcttacccgcagcaaagctcgtggaggttagcagtgcaagcagcaatacagccttcctgatgctcttgattttcattggtagtctcctgttcagaatgagtacgatgaactgttataatataacaatccctaacgggagaattccagtggctttcctgcgttcggtaaaatcacgttgcggcatttttgccggggggattacttataaagggggcatggactcaacaaaccgtagaaatctacagctggctggcttgtggcgcgggtttcattgatgttagcttatgccaaaacctggcatcttaaagagtaaaagtatgttttgtgtgatttatcgaagcagcaagcgtgaccagacctatttatatgtcgaaaaaaaagacgattttagccgtgttcctgaggaactgatgaaaggttttggtcagcctcagttagcgatgattctgccgctggatgggcggaagaaactggtcaatgccgatattgaaaaggttaaacaggcattaaccgagcaaggttactatttgcagttaccgccaccacccgaagatttgctgaagcaacatctttccgtcatggggcagaaaacagacgacactaacaaataaccgatatccggcggtggcattatctttgtcggcgcgggttttcatatccacgataaggtgaggggaacgttatgtatcaacatcacaactggcaaggtgcgctgctggattatccggtgagtaaagtagtctgtgttggcagtaactatgccaaacatattaaagagatgggcagcgcagtgcccgaagagccagtgctgtttattaaaccagaaacggcactgtgcgatctgcggcagccattggcgatcccatccgatttcggtagtgttcatcatgaagtcgaactggcggtgttgattggcgcgacactgcgtcaggctacggaagagcatgtccgcaaagccattgccggttatggcgtggcgctcgatctgacattgcgtgatgttcagggaaaaatgaagaaagccgggcagccgtgggaaaaggctaaagcgtttgataactcttgtccgctttccgggtttattcccgcggcggaatttaccggcgacccgcaaaatacaacgctgagcctgagcgtaaacggcgaacaacgccagcaaggtacgactgcggacatgatccataaaatcgttccgctgatcgcttatatgagcaagttttttaccctcaaggccggtgacgttgtgttgacaggcacgcctgatggcgtcggcccgttgcaaagcggtgatgagctgacagtcactttcgatgggcattctttgacaactcgcgttttgtaatactttttgccgcctgaaagcggcggcaaaacttgcatcgctgtgccagactggttataaggtgcgttttaacgtaatggcggaacacctgatgagcgatgtacctttctggcaaagtaaaaccctggacgaaatgagcgatgcggaatgggagagcttgtgtgatggttgcggtcagtgttgcctgcataaactgatggatgaagacaccgacgaaatctacttcactaacgtcgcctgtcgccagctcaatattaaaacctgtcaatgtcggaactacgaacgtcgtttcgagtttgaacccgactgcattaaattaacccgtgaaaatctgccaacattcgaatggctgccaatgacctgcgcttatcgtttgctggcggaaggtaaagatttacctgcgtggcatccgctacttactggtagcaaagcggcaatgcatggtgaacgtatctctgtgcgtcatatcgcagtgaaagaaagtgaagtgattgactggcaggatcatatcttaaataaacctgactgggcgcagtgataaatttaatagatgctgatgggggctttcttaatatacgtctggatgctcgccatttcgtagccctgtttttgaaagcgctctgtcataatgagagttacccgataccttattatcaacaggtaactctcaatctttaaaaaacgtctgtgtttttaaatgtgataaaccttataccttgagtacatggagagaataatcgcttatcagacttcaggtacctcaaagagtgtctttttaccgtgtcttttctgatactcattacaggtgttaatcatttttttggccgcttcttttagcaaagaaagcattaaatcatcataatcaacgtagaatctggttgtttcagtttccgtttttatctcaccgatggcggctatttcggtggttaatttcaatttggcggcatcgatatctttattcgcttgtttaaccgtgttagacagggtggtaaagaaattctgcacagattttaacttgttcttcaattctggaatcagttttccttcaactacgcccgcagcaatagaataggaaatgattaatccaaatggaccggcgacgacaccggctgcggcaccggcatatgcttccttcctgattttatctacctgactctggaaatagctgcttttttcactaaaatcattggttaactggctatctaacgccagcagtttcccggaagcgttgttgaaactttgactgcttaccagcagggatttttgcgcttcattcagcttcgtgatgccgtcatccagtaccttaatgagaatgtctttctgggcggatgctttcttctcattgtactcatcaaatagcaaaatatacgctgcgagcaattgcgtcgcaacaccacaccattcatacactgtttgggttgcttcaaaatacttatcctggctatccataagtaaggttttaatatcgccgactaaaacggaggctgcctgactatactcctgtttaaagcgacttaactcttttatggtttcatcaaaggtctgccaggggatgacctgatcgagatatttattataaagatctaatgctccatctgcggtttcgattgcgtttttaactacttctaccgttttatctgcaacgatttcagtcataatcattcgcctctttaaatatataaattgtaatgaaactcctgttttacaactattaataaattttacttcatctaattcatagttagccgggcgggatgcgtcaatgtctttatttctattaatatgataaatatcaaacaatgtttaatgtcattatggcgaatgcttctattctattttttagccgggtgatatttttcatttctgctggatgagcgtcgtcgccagaaggccacgtgagcacaagataagagaacgaaaaatcagcagcctatgcagcgacaaatattgatagcctgaatcagtattgatctgctggcaagaacagactactgtatataaaaacagtataacttcaggcagattattatgttgtttatcaagcctgcggatctccgcgaaattgtgacttttccgctatttagcgatcttgttcagtgtggctttcctagtccggcagcagattacgttgaacagcgcatcgatctgaatcaactgttgatccagcatcccagcgcgacttacttcgtcaaagcaagtggtgattctatgattgatggtggaattagtgacggtgatttactgattgtcgatagcgctattaccgccagccatggtgatattgtcatcgctgctgttgacggcgagtttacggtgaaaaaattgcaactacgcccgacggtacagcttattcccatgaacagcgcgtacagccccattaccatcagtagtgaagatacgctggatgtctttggtgtggtgatccacgtcgttaaggcgatgcgctgatgtttgccctctgtgatgtaaacgcgttttatgccagctgtgagacggtgtttcgccctgatttatggggtaaaccggtggttgtgctaagcaataatgacggttgcgttatcgcccgaaacgctgaggcaaaggcgcttggcgttaaaatgggcgatccctggttcaaacaaaaagatctgtttcgtcgctgtggcgtggtttgctttagcagcaattatgagctttacgcagacatgagcaatcgggtgatgagcacgctggaagagctaagcccccgcgtcgagatttacagtattgatgaggcattctgcgatctgacaggtgtgcgtaattgtcgcgatctgactgattttggcagagaaattcgcgcaacggtgctacaacgtacccatcttactgttggtgtggggatcgcccagaccaaaacgctggctaagcttgccaatcatgcggcaaaaaaatggcagcggcagacgggtggggtggtggatttaagtaatctggaacgccagcgtaaattaatgtctgctctccccgtggatgacgtctgggggattggacggcggatcagcaaaaaactggacgcgatggggatcaaaaccgttctcgatttggcggatacagatatccggtttatccgtaaacattttaatgtcgtgctcgaaagaacggtgcgtgaactgcgcggcgaaccctgtttgcaactggaagagtttgcaccgacgaagcaggaaattatctgttcccgcagctttggtgaacgcatcacggattatccgagcatgcggcaggccatttgtagttacgctgcccgggcggcggaaaaacttcgcagcgagcatcaatattgtcggtttatctccacgtttattaagacgagtccatttgcgctcaatgaaccttattacggcaatagcgcgagcgtaaaactgctgacgcccactcaggacagcagggatatcattaacgctgctacgcgatctctggatgccatctggcaagcgggccatcgttaccaaaaagcgggcgtgatgctgggggatttcttcagtcagggagtcgcgcagctcaatttattcgatgacaacgcaccgcgccccgggagtgagcaattgatgacggtaatggatacactgaatgctaaagagggcagaggaacactctattttgccgggcaggggatccagcaacaatggcagatgaagcgagccatgcttagtccacgttatacaacgcgaagttctgatttactgagggtcaaataaatatagcggcaggaaaaaagcgctcccgcaggagcgccgaatggattagcgaccgaacagatcacgttttttcgctttaaacggctgggaaatcaccaccagcactgcgacaatcaggtaagcgataaaaataccgagcagccactgcggcatttccagacctaaaaaatcccactgacgctcggcgcaatcgccagaggcgacaaacacttgcggcacccacttatccagcggcagccattccgggaaacgaaccataaaatcacaggtggcaaacgggctaggatagagctgaagcatggtgtgctcgtaagttaactgcacaccgcggaacgcactatacaaccagataaccatcgctacataacgcagcggagttttcggggcgatcgcgccaatcagcgcagcacccagaacgccgaataacgcgcagcgttcataaatacagagcacgcaaggtttcagtaacatcacatgctggaaccacagcgccgtcagttccagtgccagagcagtaaacgccatcaacagccacgcgccccggccttgactacattggttcaaaaatcgcaacataatcatttccctgcaatatgcatagagtgcgcagtttaaaccaattcattcgctgcgccaccaggaggcagcaaaaataggacgcaattggacaattatcgggcgaaaaggcaaaccgggcatttatatgcccggtaagttgttatcaaagcgttgctatccagcccatttgcataaaccattcggttacaggggcaagcgtaaactcgacgcagagcaagccgacgagtgtcaggacgagggtgtaaggcagggccatccacaccatgcggccataagagaggcgaatcaatggcgcgagtgcagaggtcagcaggaacaggaacgcagcctgaccgttcggcgtagcgacggagggcagattggtaccggtattaatggcgaccgccagcagctcgtattgcttcaacgtgatagcgccactttccattgccgctttcgcttcgttgatataaatcgtccccacgaagacgttatcgctaatggaactcagcagaccgttgaaaatatagaacaggctcagctgagcatgttcgcttgcctgcaacacaaactgaataattgggctaaacagttgttggtcgataatcaccgcgactacgctgaaaaacaccgtcaacagtgcggtgaatggcagagattcggtgaaggctttaccgatagcatgctcatcggtgacaccggtcaaacttgttgccagaataatgacactcaaaccaatcaagccaacttccgccagatgcaacgccagcgcagtcaccagccagacgccaataatcgcctggacaatcagacggattttatcctgacgggtacgctggtggcggctttgatcgtcaaactgttgcaacacttcgcggactttctccggcagcgtttcaccgtagccaaaccaacgcagcttctctaccagcaggcaggttaacaggccacaaatcagaaccggaacggtcaccgggctcatgcgcaggaagaaatcgccaaaatgccagccagccgctttagcgatgatcaggttctgtggttcgcccaccatggtcattacgccgcctaatgcggtgccgacaccggcatgcatcatcaggctacgcagaaagccacggaactgttccagaaccactttgtaatgcttgtcgatatgactatcgtcttgcaggtcggtgtcttcggtacgggaagaggctacgcggtgataaataccataaaaaccgactgcaacgctgatcaccaccgccacgacggttaaggcatcgaggaacgcggagaggaacgcagccgccacgcaaaaagagaggctcagcagcattttggagcgaatgcttaacagcaaacgggtaaatatgaacagcaacagctgtttcataaaatagatacccgccaccataaacatcagtaacagcaagacttcaagatttgccgccacctcttcacggacgtgttccgcgctggtcatgccgatgaataccgcttcgatagccaacagaccaccggggagcagcgggtagcatttcagggccatcgccagagtgaaaataaattccgctaccagcaaccagcccgcgacgaaagggctgatgaggaaaattaacgggtttacgattaagaaaatgatgagggcgagtttgtaccagtcgggggactggcccaaaaaattgcgccatagcgcgcggccccaggagatctccatgatggtttcccttaccttacaaataatcaatgatgtttttatgtttaaacgcaaagcttaacggtcaggcaggagtgaggcaagtcttgatagtcaaggggaaagagatgcggaaaatgaagccttgatccctttttcttctttttgtctgctatcagcgtagttagccctctggtatgatgagtccaactttgttttgctgtgttatggaaatctcactatggtcattaaggcgcaaagcccggcgggtttcgcggaagagtacattattgaaagtatctggaataaccgcttccctcccgggactattttgcccgcagaacgtgaacttagtgaattaattggcgtaacgcgtactacgttacgtgaagtgttacagcgtctggcacgagatggctggttgaccattcaacatggcaagccgacgaaggtgaataatttctgggaaacttccggtttaaatatccttgaaacactggcgcgactggatcacgaaagtgtgccgcagcttattgataatttgctgagcgtgcgtaccaatatttccactatttttattcgcaccgcgtttcgtcagcatcccgataaagcgcaggaagtgctggctaccgctaatgaagtggccgatcacgccgatgcctttgccgagctggattacaacatattccgcggcctggcgtttgcttccggcaacccgatttacggtctgattcttaacgggatgaaagggctgtatacgcgtattggtcgtcactatttcgccaatccggaagcgcgcagtctggcgctgggcttctaccacaaactgagcgcgttgtgcagtgaaggcgcgcacgatcaggtgtacgaaacagtgcgtcgctatgggcatgagagtggcgagatttggcaccggatgcagaaaaatctgccgggtgatttagccattcaggggcgataatcccttccgtttaaagagcaaacccctcaaacgaggggttttttgttgtttttacagatttcccattcttggcgggcaacgttccagcaactcgatgctgccgtcttcgttttgctgttcgagcatcacatcaaatccccacaggcgatgcacatgcttcaggacttctttgcgcccccgatccagcggtgcgcgattatgtggaatataacgcagcgtcaggctacggtcgccgcgcaaatccacgttccagatctgaatattcggctccagattacttaagttatattggctgcttaaccggttacggatctcccgataaccttcttcattatgaatagcggaaatctccagataattatgccgatcgtcatccagcacggtgaagaagcggaaatcacgcatcactttcggactcaggaactggctgataaaactctcatctttgaaatcacgcatcgcgaaatgcagcgtttccagccagtcggaaccggcgatatccgggaaccagtatttgtcttcttccgttgggctctgacaaatccgtttaatatcctggaacatggcgaacccgagggcatacgggttgatgccgctgtaccacgggctgttataggggggctggaagaccacattggtgtggctgtgcaaaaactccagcataaaacgttccgttactttcccttcatcatacagatggttaaggatggtgtagtgccagaaggtcgcccagccttcgttcatcacctgagtctgtttttgcggataaaaatactggctcaccttacgcacaatacgcaggatttcacgctgccaactttccagcagtggcgcatttttctccataaaatagagcaggttttcttgtggttcggacggatagcggcgcgcttcagcaaccgttttctcttcctcgcgcttcggcagggtacgccagagcatattgacctgactttgcagatactcttcgcgacttttctgccgggctttctcttcttgcaggctgattttttgcgggcgtttgtaccggtccacgccgtagttcatcagcgcgtggcagctgtccagaagccgttctacttcatcaacgccataacgctcttcgcactcggtaatatatttacgggcaaaaatcagataatcgacaatgctactggcgtcggtccagctacggaataagtaattgtttttgaagaaagagttatgcccatagcaggcatgagccatcaccagcgcttgcatggtaatggtgttctcttccatcaggtaagcgatacacgggttagagttaatgacgatttcataggccagtccttgctgaccgtgcttatacagccgttcagtctcgataaactttttaccgaaactccagtgcggatagttaattggcatgccgacgctggagtaggcatccatcatctgttcactggttatcacttcaatctggtgcgggtaggtatccagccggtagagtttcgccacccggtctatctctgccagataaacatccagcaggtcgaacgtccagtcgggtccatcgctcaaacgtgtggtgtccttattcatagaatcgatcgtcgccatacgcgcacctcattgttgtcggcgctctctgtgtggagcacctcatttcaagcatagaacacctgttaaaaaccgcgtcgccggagaatttttttctttgcgatttcttattatcagagtgccactaatccgcttctgaacggaattttatgctggataaaaagggcgttcagcaggagatactaaagacgccatattgccgcagagtcagggagatgtgagccagctcaccataaaaaagccgcatgttgaataatattttcaactgagttatcaagatgtgattagattattattcttttactgtatctaccgttatcggagtggctatgcgagttgtcatactgggaagtggtgtggtaggcgttgccagcgcctggtacttaaatcaggcaggacatgaggtcaccgtcattgatcgggagccgggggccgccctggaaaccagtgccgcgaatgccgggcaaatctcccccggatatgctgcaccgtgggcggcaccaggtgtgcctttaaaagcgattaaatggatgttccagcgccatgcgccgctggcggttcgtctcgacggtacgcagttccagttgaaatggatgtggcaaatgttacgtaactgcgacaccagccactacatggaaaacaaagggcggatggtgcgtctggcggaatacagccgtgattgcctgaaagcattgcgcgccgaaaccaatattcagtatgaagggcgtcagggtgggacgctgcaactgttccgtaccgaacaacagtatgaaaatgcgacccgcgatatcgccgtgctggaagatgccggcgtaccgtatcagctgctggaatccagccgcctggcggaagtggagcccgcgctggcagaagtggcgcacaaactgacgggcggcctgcagttacccaatgatgaaaccggagactgtcagctatttacccagaatctggcgcggatggcggagcaggcgggggttaaattccgctttaatacgcccgttgaccaactgctttgcgacggcgagcaaatctacggcgtgaagtgtggcgatgaagtgattaaggccgatgcgtatgtgatggcgtttggttcttacagcacggcgatgctcaaaggcattgttgatattccggtgtatccgctgaaaggctacagcctgaccattccaattgcgcaggaagatggtgcgccggtatccaccattcttgatgaaacctacaaaatcgccattacccgtttcgataaccgcattcgtgttggcggaatggcggagattgttggttttaataccgagctgttgcaaccgcgtcgtgaaacgctggagatggtggttcgcgatctctatccacgcggcggtcatgtcgagcaggcgactttctggactggtctgcgcccgatgacgccagacggcacgccggttgtcgggcgtacacgctttaaaaatctgtggctgaataccggtcacggcacgctcggctggacgatggcttgcggttccggtcagttgttaagcgatctgctctctggtcgcacgccagcgatcccatatgaggatctaagcgtagcgcgctacagccgtggatttacgccaagtcgtccgggccatttacatggcgcacacagctaaggaaacgagatgacccgtccgatacaggccagcctcgatctgcaggcattaaaacagaatctgtccattgtccgccaggccgcgacgcacgcgcgcgtctggagcgtggtaaaagcgaacgcttacgggcatggtattgagcgtatctggagcgcgatcggggccaccgatggctttgcattgcttaacctggaagaggcaataacgttacgtgagcgcggctggaaaggaccgatcctgatgctggaaggatttttccatgctcaggatctggagatttatgaccagcaccgcctgaccacctgcgtacacagcaactggcagctcaaagcactgcaaaatgcgcggctaaaagcaccgttggatatttatcttaaagtgaacagtgggatgaatcggttgggcttccagcccgatcgcgtgcttaccgtctggcagcagttgcgggcaatggcgaatgttggcgaaatgaccctgatgagccattttgccgaagcggaacatcctgatggaatttccggcgcgatggcgcgtattgagcaggcggcggaggggctggagtgtcggcgtagcttgtccaatagcgcggcgactctgtggcacccggaagcgcattttgactgggttcggcctggcattattttgtatggcgctagcccgtccggtcagtggcgtgatatcgccaataccggattacgtccggtgatgacgctaagcagtgagattattggtgtccagacgctaaaagcgggcgagcgtgtgggctacggcggtcgctatactgcgcgcgatgaacagcgaatcggcattgtcgccgcagggtacgccgacggttatccgcgccacgcgcctaccggtacccctgttttagtggacggcgtgcgcaccatgacggtggggaccgtcagcatggatatgctagcggtcgatttaacgccttgcccgcaggcgggtattggtacgccggttgagctgtggggcaaggagatcaaaattgatgatgtcgccgccgctgccggaacggtgggctatgagttgatgtgcgcgctggcgctacgcgtcccggttgtgacggtgtaacttgttgtaagccggatcggaggcaacgtcttctgggtgcaaaaaaatcatccatccggctggtcagcaactgtagttgttaatgtgacagagccattgcccatgatagtgtccattaaaaggatggacactatttccccggaacctgaactcaccgcacaggcgttctacataaaacgcttacgcttcattgttgactcgaactcgacttcagataaatcacgctttacccttgatggagcctgtacatagatttgtgtaattgcctgattttgatatgttcaattcaacatcaaatgaaggttaaattatggacgacaaacaattgcaggctcaggctgcgttcagcaaagcatcgcaaccggcgatagatgcttcattaaatttaagattcagcttcctcttcagccacccgtacgccaatcttcaacacttcattatcttctttctcggccaccgtccagatcatcccggcaaactctacctggtcaccgacaaccggtgccgcgcctaacaactgctggacaatttcacccagcgtttgctgcttatcacgatattctcgcccgtcttccaggccatatatcagcgcaacatcagcatatttggcgctggcttcgagaatgaagtcaccaaagaagcgttgatccagcgcgaccggcgggctctggctgaacagtttaccgagcgccggaagatcgcgttcccgaccaattacacacaacacatcgccttcgcgcagtcgggtgctgccggtaggatgaagcaactggttatcacgaaacagtgccgcaatacgcgtctcttttggcatatgcaaatcgcgcagtgccgcgcccacgcaccatttatcggcactcaattgataaacaaactgctcccacggattttccggatgaatatccaggccaacgcgactcaccggacgtcccactggcggaaccaccactttggcttttttagccgcccagctgagacttgttccctgcaagagcagactaaccagaaccacaaagaaggcgacattaaagaacagacgtgcattctccagccccgccatcatcgggaacacggccaggatgattggcaccgcgccgcgtaatcctacccagctgataaacacgcgctcacgcagattgaaaccgcggaaggggagcaatccagcaaatacgctaaggggacgggcgaagaatatcatccatgcggacaaaatgagcgccggaatggcaataggcagcagatcgcttgggttaaccaacagccccagcaccaggaacatggcgatttgcgccagccaggcgaggccgtcgaaattttgcaggatgccgtagcggttgcgaatagggcgattacccagcagaaaaccgcacagatacaccgccagaataccgctaccttccagcgcagtagttaaactgaaaatcagaataccgccacttaatgccagcaatggatataatccggcgggcagggcgatgcggttgatcatttgcagtagtaaataaccgccgccaagacctattacaatgcccagaccaaattgttgcagaatatcgacaatgaacatccagctaatattgctctcatgatgctggatcatcgcaattagggtaatcgtcagaaagaccgccattggatcattactgccggattcaatttccagcgtgctgccaacacgttcgttaagccccttaccacccagcagagaaaagaccgctgcagcatcggtagagccgacgatagcgccgattaataagccttcaatcaaatcaagattaaacagccacgccgccatcatgccggttaaaccagaggtgataagcacgcccagcgtcgccaggctcagtgccggtcctaacgccacacgaaaggaactggcctgagtgcgcatcccgccgtcgagcaaaataatcgccagtgccaggttacttaccatgtaggcgaaggggtaattatcaaacgggataccgccgacgccatcgactcctgccagcatgccgatcgccagaaaaataaccagaataggaatgccaagacgggaagaaaaactactaagtaatatactgctggtgacaaggatggatcctaagatgaaaaggctaattattgttgtggcatccaacggtcggttactcctgattacgctgtctcttatataaaccctaccatattagcggcagagacagcgttttacttagccctgaagcgtgatttttttacattttaagaacaggatgaccgctaatcgtcaactgagtgccttcccgggtgttattcagaatggcatgtgcgcccaacggcagcgtaaccgtgcgttgttcatgaccaaaatcgaggccggtaatgagtggaatgctcaggcgggaacgcaaaaacgcgtacacactctccaggttgtaacctgcgtcataatcattgggcgtgctgccgctaaagctaccgagaataatcgccttctgacgtggcaaaattcccgcatgatagagctgcaacagcatacgttcgacccggaaagggtgctcgttaatatcttccagcaccagaataccgttctcaatttttggcatccacggtgtaccgatcagactaatcagcatcgcaagattgcctccccacaacgtgccttcggcccgacatgtcgggccttccccttgccattcaatggtgaaggtttcattgcgtaacgccagccagaaatggtgctcggtaaaggcgttcagttcatccgcgccaaagtttgctaccagcatggggccgctaaaggtgatgacattgccatgcgccagaagaccgcactgaatggcggtaaaatcgctatgtccgcaaatgagcaacgggtcatgttgttggcgagccaccagtgcctgccagtcaatatctgccagtaaacgactggcaccgtaaccgccgcgtacagccagcacgatggtgttgggggtagtcagtctggcaagggaattgagatcttccagacgctctgtttccgtacccgcaaaacgctcacaacgacgggcaataacctcgacgttattgacttgatgccccgcgtcggtaaggcgctggataccacgcagcgcggcgtgctgtttaatgcagtaaccgcttggggcaattaagtgaaacagagacatggcaattccttgctgacaacagaaacgaaatgtatatcatgccgcttaggtgtgccgttgtcacctcaacggcgattccaggctataaggatagaagaagtgaaattgagatggtttgcctttttgattgtgttattagcgggttgtagtagtaagcatgactatacgaacccgccgtggaacgcgaaagttccggtgcaacgtgcgatgcagtggatgccaataagccagaaagccggtgcagcctggggcgtcgatccacaattgatcacggcgattatcgctatcgaaagcggtggtaatccgaacgcggtgagtaaaagcaatgccattggtttgatgcagttaaaagctagtacctccggacgtgatgtttatcgccgtatgggctggagtggtgagccgacgaccagcgagctgaaaaatccagagcgtaatattagtatgggggcggcttacctgaatattctggaaaccggcccgctggcaggcattgaagatccgaaggtactgcaatatgcgctggtggtgagttacgctaacggggcaggtgcgctgctacggactttcagcagtgatcggaaaaaggcgatcagcaaaatcaacgatttggatgctgacgagttcctcgaacacgtagcgcgaaatcaccctgcgccgcaggctccgcgctatatctacaaacttgagcaggcactggacgcgatgtaaatcagtcgcgcactttgtccgctttttcccgggcttctcgctcgagagagaaaataatccgctgtaattgccgctccaccgtcgggctgacgttaagaaaacggaagctcagacggggagtggtgatggtttcattcttgccatcaatcactttgcgctcgctgatggagattaactgggcgtcaaagtgaaaaacaccccattgccccatgttgacttcaatctgagcgaagcgcatgccttcttgtaattcggcaggctttgctgtttccagtaatgcgcccatgccgcctaagctcaaatcatacaggcggaaacgtaacgtactgttatccgccagtttggtctggcaaaaataaggcggatggagtggggcggagatgcggaaatatcggcgtcgttgtacaaaccataaggtgggaggcggtacggtaataaatgccggaagctgcaagtattcactctgctgtagttgttcaacagtaaactcgactttcgcaccctgagtttcggcggtaatggtaatgtgctgtgcctttagcacggcgatgttgtcttcggcttgactgccgaaatccagcaccagtttatccggggttattgccagtaatttgctgatcagctgcccgccattccaactgagacgcaaaggaattgcggctttgtgcaaatcgcgtaacacgcccaggacggctaacggattttgtttcaggaactgctcatggtaatgactcacgcggaaaaactcctgactgacaaactgtctttggtttatcggtcacagttaacaaaacttaatacaaatgcgtgaatattttttacatgttgttcttaaatcagccgacatacgcccagcatcgatcccgcccttgcctatacttagagcgttgatgtaagcatttcttgcgtccgattcatcgaaacgagggcctgaacatgggaattattgcctggattatttttgacctgatagccggcattatcgccaagctaatcatgccggggcgtgatggtggtggatttttcctgacctgtattctcgggatagtcggtgcggtggtcggcggctggctggcgaccatgtttggcattggcggctccatcagtggttttaatctgcacagcttcctggtggcggtggtgggagctattctcgttctgggcatattccgcctcctgcgaagagaataagattttcataaggcggatagcgatacagatgccgctatccgctttcacatcagaacgtatactcgacacctgctttacgggtgaaaaaaatcaatatagcacttcgatatccgataaagtcggttcccggtaacaacaacagaatccttttttaattattgtttcgttgtttttggtgtgattcagaaaataaatattttagacagtagccagagtggcgttaaaaatggggcggatagtgaggcggttttggctgcgcttattgaacatttagaattgatcaatccttctggcagattaagccaaaatacccgtagcgcaatgcttcagttacgcgaagaggaatggtctgaattctttttttggttgctaaattctctggagtgtctggattatgtgattattaatttaactccagaaagcaaaaaaacgttgatgagtgaacaccgtaacaatattcaggtagcaattgatgctttatatagccaacgtcggcgtaaaagcccgggtgatgaaagtgaaacacttacccgtagaaatgacgctatcttcggcaaccacgtatggcaaacatttgcgcaatacttcccgccaggacttgaaaaaccgtctgtgtaaaaaaaaccatagctatggtgttatctgccgacaacgccatccggagaagccgaatgacgttgtcggagtaagcgctggttaaggtgtgggttgtgcctctttggtactgggttgcgtcgttgcactcttaacggtcggacgcgtcgccggaacattgtcacacggttgctctttcgggcagatcaaatccagcattttcagcgtcacgccattggtccagccaaagccatcctgtaatggatattcgccaccgccgccccccgttccggtggtgctgacatcatatttttccaccagctttttctcccggtcataggtgtgctgaacattggtcaggaagtgccagctaatgtccatcgccacctctttttgcccgtagttttgtaatccttctgtcgcgacccactgtaacggtgcccagccatttggcgcatcccattgttgcccacttttcacgctcgtggtgttcaggccgccgggttgcagcagatgtgttttcgtcgccgtcgccattttgttggcgcgatctttcgctgccgcattgacgtacagcgggaacagggcggccgcggttaactgattgcgcactttatgacttttcaggtcgtaatcggcataccagccttgttgatcgttccacaggtatttttcgatccctttttgacgggcatttgccagcgtttcgtactggtttgccatcgcgttatctccggcagctttgctggcgcgggcgaggattttttccattttaaacatcaggctgttcagatcgaccggtacgatgctggtggtgcgtaaggtatttaactgctgcgggttgtccatccagcggctgctgaaatcccagccagacgcagcggcagagcgcaggtcgcggtaaatttcagtggcaggtcgattcggattgcttttggcggtggcaatatcttccacccaactctctggtcgtggcgtatcgcgatcgtcccagtagcggttgagaagggtaccatcctgaagtttgacaacgcgtttttcctgttgtccggcttgcaggttttcaacaccgtccatccagtaagcatattctttttgcatttgcggcaggtattgcttcaacgcggcatcgccttcatgctgcgccagtaactctaccatcagggcaaagaagggcggttggctgcggcttaaatagtaactgcggttgccgttgggaatatgaccgtaagtgtctatttcatgagcaaaattggccaccatatccgcgactttatcccagtgaccgctttcggcaagtcctaacatggtgaagtaactgtcccagtaatatacctcgcgaaagcgtccgcccggcacgacataaggttccggcagcggtaacagagaatcccatttttcggtgttttcggtagaacgcgttaataccggccaaagtccgtcaatatgttcgcgcagactctgcccctctggcggaacatatttctcgccttctttcggcagggtgaaattgacgttaacgaaatggcgcagatcaaatccgctctggttttgctgcatccgataatcagcaaggatcatcagcggatcgctgttcggcacggcatcggcaaaggttttttggtccggaaaaagtttggcgttttgcacatcattaaacagcggccctaataaaatatcaggcggctgtggtgttaccggtgtttcttctgcctgcacgcttagcgcagcgaaacacaaaaagatacaggctggaattaacgccattttttgcgggcgagaaggtgcgggggatttcatcaatcattctcctttggcgaaaccgaataaaacggtattcaagtatcagaaaaccttagttcaggatcgcactagctgcatgatcgaaatctcattctgcgaactgtcaggcattttagaaaagggaattaaagggataaataacggcgaaatagagtgatcaaataacgtctgtttattagccagccagcggcgttgggttcgtgattagcgaagaaaaatcatcataaattggtgaaaaatataacaggtagttaaaaaccattagtgctgagtaaattgccggatgacatcagaacgatgccatccgaacagtggcttaaccctgacggttgaaacgttgcgttttaacgtccagcgttagcgtttcttctggttgtatcgcatacagtttctcaccctgctggcaaatccagccaatccccagttcacgggcgattagggcgctgtgggataccggacttccggcgctaaggcagataccttttacaaccgccggatccagttgcagtactgtggaaggataaatgttctccgccagtagaatagttgggctgttaaactgcgggagttcttctttcgtttgggtcaggtggaccagggtgcgatgcagaagatcgtccacatcaatatagcgagcttgtagatattcatcatccagttgctggtattgctggctaagttctttaagaacttgctgccaggcatattctgccgtgcaatgttcatgctgaaggagttcgcttgccgccgccagcagttccggatcatctaacagtgtatggtgaccagaaaagattgcggcaatatcgtcaagcccgctggcttctgctttcgctgttaacgtcatcagatctaataacgtgaagtcaatagcctggcgtaatcgatcttgttcttcttccacggtcagggtactttttgcctgtaccgtacataaaactggttgataataaaaggctttaccgctaacaggcggaacgggacgcagagtaggtggagcgacttcctccgtttcaccaaagttatcttcagccagctgacggaaagcgatcagtgcctcttcagcttctggccctttcgcaatcaggcgcagcgtatcgttatagcgaacttgtagtaacgcaatctggttaatactctctggtgtgacgcatttgccgtttttttccagcaacatatcggcattaaatgtgcttaaggtataaaccagccgggaggccggacgtacatgcaggccgttacggttttttatgaccaccgccagagaacgggcttcttcatcgtacgcaggacatgtgtcagagatttcagtgtcggaggacggtaaacccagttgttcacgtttggcttccagcgcatgcatggcgtcaaagataactttgtcgatatccgccccgctggccgcgctgaccgttgctgccagtgtaccttcgaccaacggcgcagcacacaaacgtacttttgcggcgatctcgggagccagcaattccagcgcagtttcagcactcaataatgcgctacccatatccatcatgaccagcacatggtcggcatcagcaacagattcgatggcctccatcactttgacggcatcggtaccaatgggattttgtggatcgtcaattcccgcggcaatggcgattttacaactatcactcattaacatctgacgggctaattcaccgacaccttctcccagtcggctgctatgactaactatgaccaggtttaccatcaccaattccttactcttttgcggctaacgccaacatttgcatcataaacatcacgctggtcgcgccgggatcctggtgaccaatactgcgttcaccgagataactggcgcggcctttgcgggcttgcatcgtaatcgtactttgtgcagcggattcggcgatgctactggcagcttcgagcgccaccggaacagagagattttgctcgctggactgacgtaagctttccaccaccggcacccacacatcacacatggttttatcgccaggttcggctttcccgcgactgattacgccgtccgcgccatcgcggaacatctgataaagctcttccagtgtcaggctttgccgtgcctgggtcgcctgtgcggcgcggataaagaaggtaccgaacagcggaccactggcaccaccgacgctggaaagcagcgtcataccggtattcttgagaatgaaaccgatatctttatctgcgatagcagggagtttttccaccactttgctaaagcctcggttcatatttagcccgtggtcagcatcgccaatttcgcgatccagtccggtaagatactcgctctcggtgctgaaaatatcgccacaacgagtgagccagttaacaatttgagttctgctcagactcattgctttctccttatttaccccagttaagggccggggtgtggaccggggcgtcccagagtgccagcgtttcgtcatcaactttcagtaaggtgatactgaaaccggtcatatccagactggtgcagtacgcgccaattaaattacgttcgatagtcaatcccgcttgctggcaacgtgtggtcaggcggttatagacgccgtacagctcagaaagcggagttgcgccaagattgttaaccagcgcaatcacccgatcgccagactggagcggttgtttggtttgttgttcttcctgccaactgccttgttgataatcccagaaacgcaaagtgcgatggtaactgccatttaccagcagggtgtcgaacatttcatcgacggtttgatcaagggaagagaaggggcggcggtcaatacccggctcaccatgaatgccgacgccaaactccatctcattatccgccagggtaaaagaaggtttgcccgcggcaggaacggtacaggcaccgagagcgatacctatactgtggccttgattattcagcttacgccccagttccgcacaggcgtccagactgtcgccacgctccgccgctgcgcctacgagtttttcaattaatacggtgttggcaacgccgcgtcgcccggcagtataaagactgtcttttaccgcaacgtcgtcatcaatgaccacagtggtcacttttacgccgctatcgtgcagtaactcggtcgctgtttcaaagttaagaatatcgccggtgtaatttttgataatcaacagtacaccttcgccgccatcaacttgcatggcgcattcaaagattttatcgggcgtcggactggtgaaaatttcgcccggacaggccccgctaagcatcccctgaccgatataaccacagtgcatcggctcgtgtccgctgccgccaccgctcagcagggcgacttttcctgcaacaggggcatcagctcgggtgacatacaccggatcctgatgcagtgtcaggcttggatgcgctttcgccagtcctgccagttgttcgtccagtacgtcttgcacatcattgatcaattttttcattattttgctccagcaattacggtagggcatggatgatgttcaacgacacggcgaccactgactgccgatgaatccattgtgcatcaggcaagggaaaagaaaattagcccaaattatgtttcatagtgaaacatatgctttaatgaatgttccatattgaaacttttacgtgtattaatacttaaaattgcgagccggaacaccttttgtcataagggatgcgggatatgagtggcgcttttaacaacgatggtcggggcatatctcccttaattgcaacctcctgggagcgatgcaataagctgatgaaacgggagacatggaacgtaccacatcaggcccagggcgtgacatttgcttctatttatcggcgtaagaaagcgatgctgacgctcgggcaggctgcgctggaagatgcctgggaatatatggcaccgcgagagtgtgcgctgtttatcctcgatgaaaccgcctgcattctcagccgtaatggcgatccgcaaaccttgcagcagctaagtgcactgggattcaatgacggcacgtattgcgccgagggaattattggtacttgtgcgctaagcttagcggctatctctggtcaggccgtgaaaacgatggccgatcaacatttcaaacaggtactctggaactgggccttttgtgcaacgccgttgtttgacagcaagggccgattgacgggaacaatagcgctggcgtgtccggttgagcaaactaccgcagctgatttgccgttgacgttggcaatcgcccgcgaggtcggaaatttactgctgacggacagtttgctcgctgaaactaaccgtcatttaaatcaacttaatgccctgttagaaagtatggatgatggcgtgattagctgggacgagcagggtaatttgcaatttattaatgcccaggcggcgcgggtcttgcgccttgacgcgacggcaagtcagggacgggcaatcactgaactcttaacgttacccgccgtattgcaacaagcaataaaacaggcacatccgctcaaacacgtagaagcaacctttgaaagccagcaccagtttattgatgcggtgataacccttaaaccgataatagaaacgcagggaaccagctttattttgttgctccatcctgtggaacagatgcggcagttgatgaccagtcaattaggaaaagtcagccataccttcgctcatatgccacaggacgatccgcaaacccgccgcttgattcattttggtcgccaggcggcgcgcagtagctttcctgtcctgctttgtggagaagagggcgtgggcaaggcactgctaagtcaggcaattcataatgaaagcgagcgtgctgcaggtccttatatcgccgtcaattgtgagttatatggtgatgctgcgctggcggaagaatttattggtggcgatcgcacggacaatgaaaatggccgtctgagtcggctggaactggcacacggcggcacgctgtttcttgaaaagattgaatatctggcggtggagttacagtctgctttgcttcaggttatcaagcagggggttatcacgcgactggatgcgcggcgtttaataccaattgatgtcaaagtgattgcaacaacgaccgcggacctcgcaatgctggtggaacaaaatcgttttagtcgccagctgtattacgcgctgcatgcatttgaaattaccatcccgcctctgcgtatgcggcgtggcagcattccggcgctggtgaataacaaattacgcagtcttgaaaaacgcttctctacgcggctgaaaattgatgacgatgccctcgctcgcctggtttcttgtgcatggccaggcaacgattttgaactttacagcgtcatcgagaatcttgctctgagtagtgataacgggcgcattcgcgtcagtgatttgccggaacatctgtttaccgagcaggcgacagatgatgtcagcgccacccgcctttccaccagtctgagttttgcggaagttgaaaaagaggcaattattaacgcagcccaggtcacaggcggtcgcattcaggaaatgagcgctttacttgggatcggccgcactacgctgtggcggaaaatgaagcaacatggcattgatgcagggcagtttaagcgccgggtatgaaagacagaaacgatttctgatacatcagagtgatctgtatttcattccggcgcacgctaacaattttcagcatcgtttaagggcttgtctatcccgcacttaaaagctgaagcgatatcctccgttgacttgcttctgatcaaagaggttaccctgcgtgtaatccgcttcgagatagaatgtgtgctgtttgttatactgtgcactgactcccacgccgttattccagccattacctttgaaactgtacttctcccgggagttgttcaacagatattcggtatccccactaaactcgcggatagcgccagtcttcacatagacattcagctggctgttgcctgcggtgatgtcataccccagtatcatgctggcacgccccagcaggctttcgtagtgattcagatgtatattgaggccattactcgccttcatagtcatctcattctggtggctgtatgtaagctgggtttgcggctctatatagaacccataaccagtaggggacaggttgaacctctgcccggcttccagggagatgctcattccattcgcagtgccgttggcgttaacgccgttgttctgactgtccagtacgtggaaactatttttctggcggcttgcttttataacgagatcgctgtaaaaaccgttttgtgccatgtaactggcgtacattcccatgtagtcactacgtgcggtaccgtcgcctccgctatagtccgggcttgcatgtgtactgccaatatacagaccgacatacaacggcattacatcagagagacgtttatccccaccaaactggataccgctgtaacccatgtcaaagccgctcagtttgccactggcaaaggagtccaggcttcccccataactgcgcaaccagatattaccgtctttactctgatttcgcaggtcacccatccgttgcatcagcgtacggttttcaacatagttcaataagtaaccgacattgagataattgccgccagcatctgcggtcgtggtgggtttaggcgtgggagcgggttcaggcgtaggatcggggttgactatgggaggctgagcgggagctggtgtgggttcaggattaggagtcggttccggaactgtcccggaagcgtaaagctcccagttagtgccatttttacgcacatcgtacagatatccccccaactcaacctgagaagacgcgctgaagctggccgcgccgtcagtggtttttaccactgtcagaacttcatttcccgttgtggcctcgctgccctggttgcggatagccaatacgtgattaccagcactactcccgctgatattcaataaatcccctttattattaacgccattaccctcgccaacaacatcagcacgcataataaaggtactgttaccgctcaggttctctacgtttaatgtggcaaatgtgccggcagtactcccgtggctggcaaaatcgacagtactatggctcagcgccagcgtgtcgagattagaattacttgttacgttccagacgctgttattcattgcaacgtccagttttccgccattgacattatcgctgagggaggaacctgtccaaacgttcccagggtgcatatccagattgattagcccacctttggaaagaacgctaccgttgataagcatacgaccgctggcgttgatgcggctggcggcataaccatcgtcatgttgcgttgcgatggccatctggtcgggtgtactcatatcaatgaccagatcgctcgtgaggtcgatctggctgttggtcatggcataaattcccctggctcctgccgcgccggtgatagccaaactgtctccggttattctaccgccgctgagagcccacaaacccagcgccagactgccattacgatcaactgtaatatcggtattttgcatgttgacaacagccgttgccgtctgggcgctggcaccataagaaccgccggaaaagatgctgtttcgttgcgctgccgtgccagtaaaattgattatcgcgtcactaccactggtgacgaggccaccgccctgcgcggaagaaatatggctatctgcaccgatagtggttgtaccaccacgaacttcgacgccattggccgcggctccagttacatcaacagtgagtgcattcgcgctaacctggccaaagctccagaggccgtgagcattatcgccattggttttaatggtactgtttgttccgagatcgacaacagagtttttctgtacgtttatccccatggcgctgtagccctgaacatcgattgtcaggtctgtagccgtaaaacgcgcagcaccattggcgttattgccgttgagaccaccgatataaacacctgtacttccatcggtcgtgattttacttccgcttccaagatcgacactggtgccatagtcattgatggttaggcctataccgttgctgttttcaatggtgaattgagtggctgttagtgtactgctatgcccaataatgatgccgtcatcgttactcttaatggtgctgcctgtgcctaagtcagcatgggtatagtcaccaattaagttaatgccgatggcagaggtttgaccaacaacatctactgtgagtcggttagctgtcagggagctgtttttgccctgaataatgattccttttgcatatccagaggcgtcgttgacattgacggtgacatcattacccaggttgatattgccaggcgtgtttcctgctggggtcattacaccatagaggtttccacttggatcggcggtatctcctgtaattctgtcaccatcattaatagtaatattggtgccatattgacttcctgtatcagcagctatcagcaggggggaaaagataattgcattcaaaccaatagcgccaaattttatcagttgaatactggggctacggatttttaattcagcgagacgatctgctttggtattcccattgtgttgtttgatgcccataccactcctatatagtacccagactatgggtctatggattttgtcattttgtttaaatcaatgaataatatcctcttatcatcatgatatttgtatggtgcaatcatgatgagcttctcagagaataattctctattaccgggcaaaatcaggaacacaggaattaatatatatttaacatcccccttacaaaggtgagtttatatcgagttattccctaagttgtcgttacttattccaattcgttactataaatatggcaaaaatattacaacaaacagcggttaaaaaatttggtgaagattttttgtaataatcctaattagttatgggaatttcgcttgatgtatctgcataacaaaaacaatatgcgccatttttgcattactaataagaaaaagcaaaaaacatcgatattcatttttggtcaatgggttttctggcctatcgttgttattgtgctactggttatcattttcatcttgccagcatattggagcgtgatcaattttgatcagctgtgaagggggctgatgtgtagtgatacaaaaacttacgttatatcactgctaatgagatatccggcatctgaacacttatgtctttaattattctcgtggttcactataggcaataagcacaaaagtgtaggatgttacaagaatgattaggactcggtgaaatgaaaaatccacgcaattgcgtggattttatatacttttgcgctcttcatgagatttagcgaaacctcatgagacaataaattaattagacgttgaaaaggaagttcatcacatcgccatctttcacgatgtaatctttaccttctgcacgcattttgcctgcttctttcgcgccttgttcacctttgtaagtgatgaaatcttcaaagctgatggtttgtgcacggataaagcctttttcaaaatcagtatggattttgcccgctgcctgcggcgcggttgctccaaccggaatggtccatgcacgcacttctttcaccccagcggtgaagtaagtttgcaggttcagcagtttataaccggcacggatcacacggttcaggcccggctcttccagcccaagctcctgcataaactcgtcacgttcttcgtcgtccagttcggcaatgtctgcttcaacagcagcacaaaccggaaccacaacagaaccttctttcgccgcgatttcacgcacctggtcaagatatgggttgttttcaaaaccgtcttcgttgacgttggcgatgtacattgttggtttcagcgtcaggaagctcaggtaacgaatagccgctttctcttcagcgcttaaatccagcgcgcgcagcatacctgcattttccaactggggcaggcatttttccaggaccgccagctcagctttcgcgtctttatcgccacctttggctttcttctgtacgcgatgaatcgcacgttcgcaggtgtcgaggtctgccagcgccagttcggtgttgataacttcaatatcgtcagccgggttaactttgccggaaacgtgaatgatgttgtcattttcaaagcagcgaacaacgtgaccgatcgcttcggtttcacggatgttggtcaggaactggttacccagaccttcgcctttgcttgcgccttttaccagaccggcgatatcgacaaattccatggtcgtgggaagcgtacgctgcggttttacgatttcagccagttgatccaggcgaggatcaggcattggtacgacgcctgtgttcggctcaatggtgcagaatggaaagttggccgcttcaataccggctttggtcagcgcgttgaacagggtagatttcccgacgttgggcaaaccgacgataccgcatttgaatcccatgatttaaatcaccttaatatcttaataatcaacctgttattgctaacagattgcagaaatggaaataactttgcctattatacacggcactcggcaaaaatgccgcagacaacgacttattgcgctttaaaggcgtgcaatcggttcgttgctttggtcaagccatctgtaaaccacatttcagtacaacgcgccgcttcgtcaatggcttcatcaattaacttctgttcactaacaggcggtttgcctaacacaaaaccgacaactttatttttatcgcccggatgaccgattccgatgcgtaaacggtgaaagttagggttattacccaatttactgatgatgtctttcagtccattgtgaccaccatggccaccgcccaatttaaatttggcgacgccaggaggcagatccagttcgtcgtgggccaccagaatttcgtccggattaatgcggaaaaaactggccatcgccgcaacggctttgccgctgagattcataaatgtagtcgggactaacaggcggacatcttcgcctccaagagtgactcggctagtataaccaaagaatttagcctcttcgcgcagcggagcgcgcaaacgctctgccagtaagtcaacgaaccaggtaccagcattatgtcgcgttgcggcgtattcagcaccggggttcgccaggccgacaatcaatttaatcgtcacgtttttttgtcctgagtgtgtacataactggcgcgtagtttactggttgcggccccgcttgacaaaaaactgcgtatcaaatgcagataacgtaataattgcctgagtggactattagaaagtcaaggtgttcaggcgtttatttgtaaagttttgttgaaataagggttgtaattgtgatcacgcccgcacataacccactgggtgttgtctatactttacacataaggaagaggggtattccctgttacaacccagaaagttccggaggtgacatatgaaacgcaaaaacgctagcttactcggtaacgtgctcatggggttgggtctggtggtaatggtggtcggcgtggggtatagtatcctcaaccagttaccacagtttaatatgccccagtatttcgcacatggtgcagtgctaagtattttcgtcggtgccattctctggctggcgggtgcccgtgttggcgggcatgaacaggtgtgcgaccgttactggtgggttcgccactatgacaaacgttgccgccgtagcgataatcgccgtcatagctaacaaataatgcagtttgctgaccagtcagtttgcgctgactggtcaatctcgtacttataaatccgccatcgccgcgcgacgattcgggaagaacgccaggcgtcccgggatcggttgaatgccagcgcgagccatagtgcgcagtggctggaattccacgttgcacacgcgcagttcacatccctcgggcagacgcttcacaaaacgctggaacgcatcaagaccaccagcatcaagtaccggaacggcatcccacttcagaatcacaatccgtttgccttcaagacgactctccaggtccgtgaataagccttcagcagcagcaaaaaacagcgggccaataacgcgcagaaccaggacatcgtctggaacatctacgactaccggtgccaggcgagtcatacgtgcgatacgacgcataaacagcaggcttgccagcacgatccccacgctgatggcaataaccatatcaaacaacacggtcaggctcatgcacagcagcatgacgatgatgtcatctttcggcgcatgacgcagcaagtcgaccactttgtgcgcttcactcatgttccacgccaccatcaacagcagggctgccatggcggaaagcggcagccaggagagcagcggtgccagtaccagcagggcaagaataaccagaatagagtggatcaccgcgctgataggggacgttgccccggcacggacgttagcggcagaacgcgcgatggcagctgtagcggtaataccaccaaagaacggagcgataatattccccagtccctgtccaaccagttcgctgttcgccttgtgtttcgtcccggtcataccatccagcaccacggcgcagagcagagattcgattgcgccgagcattgccatactgaatgccgcaggcagcagtgtgcgaatagaatcccaggttagcgtgaattcactattaggcagatcccacggcagcaccagttgcggcagcagttgcggaataccgttaccctgagaaccatcggccaggacgtagtggaattggctaccgatggtagcaacatgtccgccgagcaggttaacaatccccatcaccgcgcaaccagccagcaaggccggaaggtgaccgggtaaacgaatgcccagacgcggccaaaaaacaagaatacctagcgtcacaatgccaatggcagcatcacccacattaatggtcggcagcgccataaataatgcgccgactttttgtagataatgttccgggacatgggccatttgcagaccgagaaaatctttaatctgcatggtaccgatggtgatcccgataccgctggtgaaacctaaggtgacggaaaccggaatatactcaatcaggcgaccaaagcgtgccagacccatcagaatcaaaaagatcccgctcagcaaggtcgcaaccagcagtcctgccagtccaaactgttggctcacgggatagagaattaccacaaatgccgcagtcggaccggaaacgctaaagcgactcccacccgtcagagcaatgacaatccccgcaacagctgcggtatataaaccgtactggggtgccacaccactaccaatagccaacgccatcgccagcgggatagcaataatcccgacggttatcccggcaatcaggtcacgggtaaaccgtgcggcagtatatttttctttccagcaagcgtcgatcagagcgcggaaaggcatcacatgactggaaaatattttgttcacaataatgtttcatccgtgagcgcatcatctgtcaactaaatggcaggtgaaggaggcataggtcatacaaatggatattacagacaaaaaaacccgccgcagcgggtctttgagccgggttcgattagtgttcgaacatggcagagatgctttcttcgttgctgatacgacgaatcgcttcggccagcataccactcagggtcagagtacgcacgttcggcagacttttgatttcatcgctcagcggaatggtatcgcagacaacgacttcatcaattacagagttacgcaggttgttcgccgcgttgccagagaagatcgggtgagtcgcgtacgcaaatacacgtttagcaccacgttctttcagagcttcagcagctttacacagcgtaccgccagtgtcgatcatatcatcgaccagtacgcagtcacgacctgcaacgtcaccgatgatatgcatcacctgactaacgttcgcacgcggacgacgtttgtcgatgattgccatatcggtatcgttcagcagcttagcgatagcgcgggcacgcacaacgccgccgatgtccggagaaaccacaattgggttatccagattcagctgcagcatgtcttccagcaggatcgggctaccaaatacgttatcaaccggaacgtcgaagaaaccctgaatctgttcagcgtgcagatccactgtcagcacacggtcaacaccgacgctggagaggaagtctgcaaccactttcgcagtgattggtacacgagcggaacggacgcgacggtcctggcgcgcatagccaaagtaggggataacagcggtgatacgacctgcggaagcacgacgcagggcatcaaccataacgactaattccatcaggttgtcgttagtaggggcacaagtggactggatgatgaaaatatcaccaccgcgtacattttcattaatttgtacgctgacttcgccatcgctaaagcgacctacagcggcgtcgccgagactagtgtacaggcggttggcaatacgttgtgctagttccggggtggcgttaccagcaaaaagcttcatatcaggcacgagaagaacctcaggcatgcgtccattggtggaaagaatctgccgaaaactgtgcgggccaggcatgatcctttccaggcggtgtattaaagagcgcgatgcaacgtctggaacaaggtgacgttgtcaccgaaactcagcttgcccggcttaaagcatggctctgtgcaatggggaaagattagcgcctttcgccacaaagccattgagccattccggggcttgctctagcacctggcgggcttcagactctgtatcaaattcagcaaagacacaggcccctgtcccagtcaggcggctcggggcgtattctaacagccaggaaagcaccgcatcaacctcgcgaaaacgttttcttgcgataacctcgcaatcattgctgaattcacattttagcaacgtttctatactcctttttggcgtattgcgcgggagttcaggatctttaaaaatcaccggagtcggaatacttacaccagggtgcgccaccagataccacttctctggcggatccaccggcgttagtatttcaccaacgccttcggcaaacgcggcatgcccccgaacaaagacaggaacatctgcgcccagcgtcagccccatttccgccagctcatccatgcttagcccgcattgccagagatgatttaatgccaccaggaccgtcgcggcattggaactaccaccgccgagaccgccgcccatcggcaaacgcttgtcaatgctgatattcgcaccgcttcccgtcggaagacgcccgctgtctgccgcagttttcatcaacaatcgcgctgcgcgaacgatcaggttatcttcatgttccacgccttcaacgggcgttaacagacgaatatccccatcgtcacgaagctcaatgctgatggtgtcgccgtaatcaagaaactgaaacagcgtttgcagcgtgtggtaaccatccgcacgctgaccggtaatgtataaaaacagattaagttttgccggagagggccactgtgtccgcattatttcactatccagttatccatttttaacttgatgcgttgaccaccgtcggtgagttccatattggctggcatcgcaggttgcgttttggtgtcataaccaccataaacaaccttccagtttttgccattctggctgtaggtaatttcgctcaggcggtactggtcgtccagtttgtagtcggttgcatcacccggtaaacctaaaatccactggcgcaagctgttgagcggaattggcattccggtcaatttgccaatcatctcttcggcgtcatcggcggtataacgctgacctttattgtcgactaactgcacgttacccggttgagcattcagctccagttccgtgctgcccaatgggttagtgagcagcagacggtagcgatcctggccggtttgctgccagaaaaagcgggcgtacactttttgttggtcagaaatataagcgaacgcgccgcgagtctgatactgattaagattgcgcacgtcttgctgatgctgacgccattgtgggctatccgggcttttgccaggacctttgggcgtggtaacggaacaggcagtgagcacaagagcagccagcggtagcaggcggataagacgaaaatcgggcaggggcatagtgatgacaagtccttgagatacgttgcagttataacccttaatgctagcgttaccgtccgctatcgtctatgttcaagttgtcttaattgccagaatctaacggctttcggcaattactccaaaagggggcgctctcttttattgatcttacgcatcctgtatgatgcaagcagactaaccctatcaacgttggtattatttcccgcagacatgacccttttagcactcggtatcaaccataaaacggcacctgtaagcctgcgagaacgtgtaagctttagcccggataagctcgatcaggcgcttgacagcctgcttgcgcagccgatggtgcagggcggcgtggtgctgagcacgtgcaaccgcacggaactttatcttagcgttgaagagcaggacaacctgcaagaggcgttaatccgctggctttgcgattatcacaatcttaatgaagaagatctgcgtaaaagcctctactggcatcaggataacgacgcggttagccatttaatgcgtgttgccagcggcctggatagtctggttctgggggagccgcagatcctcggtcaggttaaaaaagcgtttgccgatagccaaaaaggtcatatgaaggccagcgaactggaacgcatgttccagaaatctttctctgtcgcgaaacgcgttcgcactgaaacagatatcggtgccagcgctgtgtctgtcgcttttgcggcttgtacgctggcgcggcagatctttgaaagcctctctacggtcacagtgttgctggtaggcgcgggcgaaactatcgagctggtggcgcgtcatctgcgcgaacacaaagtacagaagatgattatcgccaaccgcactcgcgaacgtgcccaaattctggcagatgaagtcggcgcggaagtgattgccctgagtgatatcgacgaacgtctgcgcgaagccgatatcatcatcagttccaccgccagcccgttaccgattatcgggaaaggcatggtggagcgcgcattaaaaagccgtcgcaaccaaccaatgctgttggtggatattgccgttccgcgcgatgttgagccggaagttggcaaactggcgaatgcttatctttatagcgttgatgatctgcaaagcatcattagccacaacctggcgcagcgtaaagccgcagcggttgaggcggaaactattgtcgctcaggaaaccagcgaatttatggcgtggctgcgagcacaaagcgccagcgaaaccattcgcgagtatcgcagccaggcagagcaagttcgcgatgagttaaccgccaaagcgttagcggcccttgagcagggcggcgacgcgcaagccattatgcaggatctggcatggaaactgactaaccgcttgatccatgcgccaacgaaaagtcttcaacaggccgcccgtgacggggataacgaacgcctgaatattctgcgcgacagcctcgggctggagtaacagtacatcattttctttttttacagggtgcatttacgcctatgaagccttctatcgttgccaaactggaagccctgcatgaacgccatgaagaagttcaggcgttgctgggtgacgcgcaaactatcgccgaccaggaacgttttcgcgcattaagtcgcgaatatgcgcagttaagtgatgttagccgctgttttaccgactggcaacaggttcaggaagatatcgaaaccgcacagatgatgctcgatgatcctgaaatgcgtgagatggcgcaggatgaactgcgcgaagctaaagaaaaaagcgagcaactggaacagcaattacaggttctgttactgccaaaagatcctgatgacgaacgtaacgccttcctcgaagtccgagccggaaccggcggcgacgaagcggcgctgttcgcgggcgatctgttccgtatgtacagccgttatgccgaagcccgccgctggcgggtagaaatcatgagcgccagcgagggtgaacatggtggttataaagagatcatcgccaaaattagcggtgatggtgtgtatggtcgtctgaaatttgaatccggcggtcatcgcgtgcaacgtgttcctgctacggaaagccagggtcgtattcatacttctgcttgtaccgttgcggtaatgccagaactgcctgacgcagaactgccggacatcaacccagcagatttacgcattgatactttccgcagcagtggggcgggtggtcagcacgttaacaccaccgatagcgcaattcgtattactcacttgccgaccgggattgttgttgaatgtcaggacgaacgtagtcaacataaaaacaaagctaaagcactttctgttctcggtgctcgcatccacgctgctgaaatggcaaaacgccaacaggccgaagcgtctacccgtcgtaacctgctggggagtggcgatcgcagcgaccgtaaccgtacttacaacttcccgcaggggcgcgttaccgatcaccgcatcaacctgacgctctaccgcctggatgaagtgatggaaggtaagctggatatgctgattgaaccgattatccaggaacatcaggccgaccaactggcggcgttgtccgagcaggaataatggaatatcaacactggttacgtgaagcaataagccaacttcaggcgagcgaaagcccgcggcgtgatgctgaaatcctgctggagcatgttaccggcagagggcgtacttttattctcgcctttggtgaaacgcagctgactgacgaacaatgtcagcaacttgatgcgctactgacacgtcgtcgcgatggtgaacccattgctcatttaaccggggtgcgagaattctggagcttgccgttatttgttagcccagcgaccttaattccgcgcccggatacggagtgtctggtggagcaggcactggcgcggttgcctgaacaaccttgccgtattctcgatctcgggacgggtaccggggcgattgcgcttgcgctggctagcgagcgcccggactgcgaaattatcgctgtagatcgtatgcctgatgctgtctccctggcacaacgtaatgcccagcatctggcgatcaaaaatatccacattctgcaaagcgactggtttagcgcgctagccgggcagcagtttgcgatgattgtcagcaatccgccgtatattgacgagcaggaccctcatcttcaacaaggcgatgtccgctttgagccgctcactgcgctggttgcggcagacagtggaatggcagacatcgtgcatatcatcgaacagagccgtaacgcgctggtatccggcggctttctgcttctggaacatggctggcagcagggcgaagcggtgcgacaagcatttatcctcgcggggtatcatgacgtcgaaacctgccgtgactatggtgataacgagcgcgtaacgctcggccgctattatcaatgacaagtttttctacactgcttagtgttcatcttattagtatcgcgctttctgttgggctattaaccttacgtttctggctacgttatcagaagcatccacaggcatttgctcgctggacgcgcattgtgccgccggttgtcgatacgctgttactgttaagcggcattgcgttgatggctaaagcgcacatcctgccattttccgggcaggcacagtggctgactgaaaagctgtttggagttatcatttatatcgttttgggttttattgcactcgattatcgtcgtatgcacagtcagcaggcgcgcattattgccttcccgctggcgttggtggtgctgtacatcatcattaaactcgccaccacaaaagtaccgttactggggtaagtcatgagaagcttagctgatttcgaatttaataaagcgccattgtgcgaaggcatgatcctggcttgcgaagcaatccgccgcgattttcccagccaagatgtttacgacgaactggagcgtctcgttagtctggcgaaggaagaaatcagccagcttctgcctttagaagagcagttggaaaaactgatcgcgctgttttacggcgactggggatttaaagccagtcgcggtgtttatcgtctttccgatgcattatggctggaccaggtgttaaagaatcgacagggcagtgcggtaagtttaggtgcggttttattatgggtcgcgaatcgtctcgatttgccgctgctgccggtgattttccctacgcagctgatattgcgcattgaatgtccggatggcgaaatttggctgattaatccttttaacggtgaaagcttaagcgaacatatgctggacgtatggttaaagggaaatatcagcccgagcgcggaactgttttatgaagaccttgatgaagctgataacattgaggtaatccgcaaattgctggatacactcaaagccagcttgatggaagaaaatcagatggagctggcgttacgcaccagcgaagctttattacaattcaaccctgaagatccctatgaaattcgcgatcgcgggttgatttatgcgcaactggattgcgaacacgttgcgttgaacgatttaagttatttcgttgaacagtgtccggaagacccgatcagcgaaatgatccgtgcgcaaataaataacatcgcgcataaacatattgtgctgcattaattaatcgacattttactcaagattaaggcgatcctatgaaacaaaaagtggttagcattggcgacatcaacgtagcaaatgacctgccgttcgtactgtttggcggtatgaacgtgttggaatctcgcgatctggcgatgcgcatttgcgagcactacgtaactgtgacccagaaactgggtatcccttacgtgttcaaagcctcttttgacaaagccaaccgctcctccatccactcttatcgtggaccgggcctggaagaagggatgaaaatcttccaggagttgaagcagacttttggcgtgaaaattatcaccgacgttcacgaaccaagtcaggcacagcccgttgctgatgtcgtggatgtgattcagttgccggcgtttcttgctcgccagactgacctggttgaagccatggcgaaaaccggtgcggtaattaacgtcaagaaaccacagtttgtcagcccgggacagatgggtaatatcgttgataaattcaaagaaggcggcaacgaaaaagtgattctttgcgatcgcggtgctaacttcggctatgacaacctggttgtcgatatgctgggcttcagcattatgaagaaagtgtctggtaacagcccggtgattttcgacgtgacccacgcactgcaatgccgcgatccgtttggcgcagcttccggtggtcgtcgtgctcaggtggctgagctggcacgagccggtatggcggtaggtctggcggggctgtttattgaagcgcatccggatccggaacatgcgaaatgtgatggtccatccgcgctgccgctggctaaactggaaccgttcctcaagcagatgaaagcgattgatgatctggtgaaaggtttcgaagaactggataccagcaagtaatcttttttgcttgaaaaataaagtattagcgttctgcgttaagacttttttcatgggtgccggatacaaaaaaggccgcaggctgttacccctgcggccggtttcgggcgcatattgccatcacggcagcctgacgcccgttttcaccttacttccggttacgccaccagctgacaatcgctgcggtaataattcccgccaggatcggtgctgccaggtcgtgccagaaaatcatggcaaactgcgcgagcgtcatatagccgccttgttgtaatgacaacattttgcggctattcttgaattgttctggttcaagattagcccccgttctgttgtcaggttgtacctctcaacgtgcgggggttttctctttccagcaaccaatgccaccagggataaagcccccgcaacattgcgcctcaccggataacgccggcttggtgtggatactacgactcaattcatcttcacttcatccctgaaatgtttgcaatgaagagtgcattccggtttttcaacagctgttacagtcatttcatgagtgctctggatgaggcttccagctcgggttgccaatatttacttgtggaagtgataaagacaaaaatggccgcaggctgttacccctgcggccggtttcgggcgcatattgccatcacggcagcctgacgcccgttttcaccttacttccggttacgccaccagccgacaatcgctgcggtaataattcccgccaggatcggtgccgccaggtcgtgccagaaagtcatggcaaactgcgcgagcgtcatatagccgccttgttgtaatgacaacattttgcggctattcttgaagtgtctggtttcaagattagcccccgttctgttgtcaggttttacctctcaacgtgcgggggttttctctttccagcaaccaatgccaccagggataaagcccccgcaacattgcgcctcaccggataattccggcttggtgtggatactacgtctcaattcatcttcacttcatccctgaaatgtttgcaataaagagtacattccggcttttcaacagctgttgcagtcgtttcatgagtgctctggatgatgcttccagctcgggttgccaatatttacttgtggaagagataaagacaaaaatggccgcaggctgttacccctgcggccggtttcgggcgcatattgccatcacggcagcctgacgcccgttttcaccttacttccggttacgccaccagctgacaatcgctgcggtaataattcccgccaggatcggtgctgccaggtcgtgccagaaaatcatggcaaactgcgcgagcgtcatatagccgccttgttgtaatgacaacattttgcggctattcttgaagtgtctggtttcaagattagcccccgttttgttgtcaggttttacctctcaacgtgcgggggttttctctttccagcaaccaatgccaccagggataaagccccgcaacattgcgcctcaccggataacgccggcttggtgtggatactacgtcgcaattcatcttcacttcatccctgaaatgtttgcaatgaagagtacattccggcttttcaacagctgttgcagtggtttcgtgcagggtgtggtacaggctcgcaattctgattaacgacctgtccaggtagtatgaagaaatacaataagcaggaatttatattatctcccccgattaccgtcatcggaggagatataactgtcaggcaaatatcgtcatcaaataggcggcaaacagtgccagatgcgctgcgccattgagcatgttagtacgtccggtggagaaggagatatggcacagcactaaagaggccaccatcaccaccatttctggcgcaccaagtgcaaactgcaattcgttacccgtcataaaggcaattagcgtgacgacaggtacggtaaggctaatggttgctaacacactaccaaagaacagattcatcgcgcgctgaacctggttgttcaacactgcttttaatgcacctaaaccttccgggctcagaatcaacagtgccaccaggaagccagtaaaggcgacaggggcattcatgctgtcgagcaatgtctccaggctgctggcgttcattttggtcaccgcaataacggcaatcagatggataatcaaccagatagcatgccacaggctgctatgggcagacggtttaccgtgatgcgggtcgtcatcatcactgtcatcttcgtgctcgtagacaaacaaactttgatgcgttttggtctggatcagcaaaaatacgccatacattgccgcagaaattaatgctaccagtaacgcctgaccggtactaaaattcgccgcaggcagagccattggaaataccagtacgattatcgccagggggaacagcgcaattaaatactgcttgataccaaacagattcatatattgggtggcaaacttacgaccgcccaacaataaactaaagccaaccagcccaccggtaacaatcataatgatactatagagcgtatcacgcattagcgttggcgcggcgtcgccggttgccattaaagcactaatcaaactgacttcaagaataaccacactaaggctaagaataaggctaccgtaaggttctcccaggcgatgggctaatacgtccgcatgacggacaacactaaaggcgctacttaaaataccaataagcgcaagaagattgatggcaatgaccactggtagtgtctggctgcttccccacaggaacagcactaccagcgccagaaccgggaaaataaggctagtctccttgtggcgggtttttaccgcctcttgagcattactcattatggttatccctttgcagatgaatttatcgaaaatgtaaaaaataggtaggaaaaataacagaaagtgtctggatatcggtaacattttacgaatttttaccccgctgtcgattttttactcattggggcataaaaataagtattacgtttagacaatgtttgttttagcgtctcttaagaagagtctgacctgaaaattcttatgttttggcaagagtagatattgttgaccacacttaatgttcaactttgtaaaaggagtcaacgatgccgtataaaacgaaaagcgatctgccggaaagcgtaaagcacgttctaccgtctcatgcccaggatatctataaagaagcgttcaacagcgcatgggatcaatataaagataaagaagatcggcgtgatgacgccagtcgcgaagaaaccgcgcataaagtggcctgggctgctgtgaagcatgaatatgccaaaggggatgatgataaatggcataaaaaaagctaaaaccggtcgcttagttaaagctattcgtgcggtgttgccttgcaagtggtccgtggattgcatattgtcccgttagtggtttcaaaatgagcagtaaaaatgtccggaagacaccaaaaagttgtcgcagggaagtatgcagtggcggaagtgtaaggtgataacgcgtgatttcttgatgaatgccgattgtaaaacggcatttggtgccattgaagaaagtctcttatggagtgcagaacaacgggcggctagcctggcggcgacgctggcttgtcgacctgatgagggaccggtgtggatcttcggctatggaagcttgatgtggaatccggcactggagtttaccgaaagctgcaccggtacactggttggatggcatcgcgcattttgcctgcgcctgaccgccgggcgcgggactgcgcaccagccgggacggatgcttgcactgaaagagggcggacgcaccacaggcgtcgcctatcgactgccagaagagacgctggagcaggaactaaccctgttgtggaagcgagagatgattaccggctgttatctgccaacctggtgtcagcttgatcttgatgatggacgcacagtaaacgccattgtgtttattatggacccgcgacatccagaatatgaatctgatactcgcgctcaggtcatcgcgccgttgattgcggcggcgagcggtccgctgggaaccaacgcacaatacctgtttagtctggaacaggagcttatcaaactgggaatgcaggacgatgggctgaatgatttgctggtaagcgtaaaaaaactgctggcggagaattttccggatggtgtgttacgtccgggattcgcctgagtaaacttcccgcatagtggggcgtcagacgccccctcaaacattaaaatgtgagcactttatcggcactcagcgtccattgcgccagttccacaagagtaccgatttccaccccatcaatcagaggaagtgtactaatcccgcgcccgtcggtacaggttttgcacaatttcaccggtacattctgagcggtaaggatctccagcatttgctgaatgttgtagccttcccctggtttttgcccgcgcaacccggctgtgaccgcatcagacatgaggaacagacgcagatccagattgctctcctgctctcgtaacgcaatggccagccgcaagctgttaaacaaggattcgctcccgtaaggtgcgccattggcaacgatcacgattttttgcattatttactcctgtattcagggaattagacactcatcttctatcttactgcttctgcagcgtctgaccaatcggtcacatttttaaggattttcctgaaagcgcgagaaaatacgacaaaagttgccagtaatcgttattctttaaggctatggtttttcattattaccggaagttaccgacgttttgagccgtttcgttcctcgcattatcccgttttatttactcttgcttgtagcaggcggtacagctaacgcacaatctaccttcgagcaaaaagcggcaaatccctttgataataacaatgatggtctgccggatttaggcatggctcccgaaaatcatgatggggaaaaacactttgctgaaattgtgaaagatttcggcgaaaccagtatgaatgataacgggctggatactggcgagcaggcaaaagctttcgcattgggaaaagtccgcgacgcgcttagtcaacaggttaatcagcacgtagagtcctggctaagtccgtggggaaatgccagtgttgacgtcaaagtggataacgaaggacatttcaccggcagtcgtggaagctggtttgtgccgttacaagataatgatcgttatctcacctggagccagcttggtcttactcagcaggataatgggttggtgagcaatgtgggcgttgggcaacgctgggcgcgcggcaactggctggtgggttataacactttttatgacaacttgctggacgaaaatcttcagcgagcgggctttggtgccgaagcgtggggcgaatatttgcgattaagcacaaacttttatcagccgtttgctgcatggcatgaacagacagccacgcaggaacaacggatggcgcgcgggtacgacctgacagctcggatgcgcatgccgttctatcaacacctcaataccagtgtcagcctagaacagtattttggtgatcgtgttgatttgtttaactctggtacgggttatcacaatcccgtcgcgttgagtctgggattaaattacacccctgtgccattagtcactgtgacggcccagcataaacagggtgaaagtggcgaaaatcaaaataacctcgggctgaatcttaattaccgctttggtgtaccgctcaaaaaacaactttctgcgggcgaggttgccgaaagtcagagcttacgtggtagtcgctatgacaatccgcagcgaaataatctaccgactcttgagtaccgacagcgaaaaacgttaacggtgtttctggcgacaccgccgtgggatctaaaacctggcgaaacagtgccgctgaaattacaaatccgcagtcgttacggtattcggcaactgatttggcagggcgatacgcagatattaagtttgacgccgggcgcacaagccaacagcgcggagggctggacgctgatcatgcctgactggcagaacggggaaggggcaagcaatcactggcgattgtctgtggtggtggaagataaccaggggcagcgtgtctcctccaatgagatcacgctaacgcttgtcgaaccgttcgatgcattgagtaacgacgaactgcgctgggaaccgtaatcagaaaatgcgctcctgatgcacccataccgctgcttccacgcgagacttgagcttcattttcttcagcatgtgcttgacgtgcacttttactgtgctttcggtgatatccaggcggcgggcaatcatcttgttcggcaaaccctgggcaatcagcttgagaatatcgcgctcgcgtggggttaactggttaacatcgcgctcagtagtggcacggttagcgcgcaagctggcggccagaacaggcgttaatgcttcgcttaataccatttcgccagcagctgcctgatgcaatgctttcagcagatcttccggttccatatcttttaacagatagccatccgcgccgcgtttcagtgcggtgaccacatcttcttcatggttagagacgctgaataccacaatgcgcccactgagggacttttcgcgcagtttatccagcgtttccagaccgttcatgccgggcatattgagatctaacaggatcagatcgggatcaagagactccgccagttcaataccctgttcgccattactcgcttcgccaaccacggtgatatctggtgccatactgataagctgttttacgccagttcgcagcatcgggtgatcgtcaatcagcaggatagtagccggttcctgattactcatgggtatctccttggacgtctgtgaaagttttttcgggaataaaggtgaccaccacttcggtgccaccactttcacgacggcggacgcggcaatcgcctcgtaaactttgcgcacgatcgcgcattattatcatgccgtagtgattgctgcggatggcattttcaggcacgccgcagccgttatcctggacggtcagtttgacctgattatcgttttgcgccaccgtcaccacgacttcactcgcttggctatgtttgagggcgttacttaatgcctcacgggcaatttgcaacaagtggattgcctgatggctaggcaccaggcgaggcggcaattgataatccagcttcaccgggaagccaaatttggcgctgtactcttcgcaactcgcctccagcgccggacgtaatccaggctcggtgagctgcaagcggaatgtggtgagcaattcacgcaactgcgcccaggatgcattcagttcgttacggatctgacttaacagttcgcggctgctttctggcagcgcatcgccctgcatctgtaaacaactcacctgcatcttcatgcaagagagagattgggcaatagaatcatgcagttcgcgcgcaatggtggcacgctcttccatcacgatcaactgttgctgacgttcctgatggcgatccagcgccagcgtggcggtgagttgttcaaccagggtatccaccagttgttgttgatcatggctaagatgacgcccctgcggcagggtcgccagcaaaataccgtactgcgtatgagagtcagccagccgccacttcagggtcgtgccgcgatcaccaacgggtaatacgccgcgcgggcagagctggcagcctttatcatcacaagtcatatctggctggcaggtaaactcctgatgattctcttcatcatcagtgtcatacacccgcaattcgatatcacgtagcagggttaaattctgtaagccgttgagtacaggactcaggcgttcacacagcggggcgcgggaatgcaaacggcggttagcctgccataaaaaagagaggatctgatttttatgctccagcccggcggttttctcctgaacccgctgctcaagtacggcataactttcggccagttctgcagacatattgttcaacgcagttccaagcatcgccatttcgttgcgcccgctgatgtttgcgcgttgggtaaaatcgcgatgactgacggcactcgccattgccagcagttgccgccacggttgtagcagtcgcgcccgcaaccagataatagtgaacaccagtaaaagtgccataaataccgccattacccgatggaccagtaccactgtctcgatgcgcatttccgtggtgcggtcaaaaccagataccagttgatcaagcccggcaacaaactggctgacatccgcactcaccgtttctcggttttgtgcacgcatcagcgcagggatcagttcattacgccagtaatcttgtaaaccctgtaattgcgccagttgtccgtctcgttctgctgctcgagtcaactcggcgctaaatgccgtttgttccatctctttaattaagggcttgtctttctcgcttaatggcactgccgccaacagacggtaactttgcatgcgcaggcttcccgctttgttgatcgcatgggcgctgccctgaacgccttgcaccagccagccagaaaccgccatccctgccagtccaatagcagtagaaagcaacacaataagcgcaacctgattaaccagggtgagcggagagagacaacgtttaagcatgtaaacctcttccttcaggctttaaatgagcaataaccttaatgaatgtgacgatacattctggaatggcagtattctcggctattggctgaagtatacccatacccggaaagagttactccttatttgccgtgtggttagtcgctttacatcggtaagggtagggattttacagcaccgtgaaaaatctcataatttttatgaagtcactgtactcactatgggtaatgataaatatcaatgatagataaagttatcttatcgtttgatttacatcaaattgcctttagctacagacactaaggtggcagacatcgaaacgagtatcagaggtgtctatgagtcacagttccgcccccgaaagggctactggagctgtcattacagattggcgaccggaagatcctgcgttctggcaacaacgcggtcaacgtattgccagccgcaacctgtggatttccgttccctgtctgctgctggcgttttgcgtatggatgttgttcagcgctgttgcggtgaacctaccgaaagtcggctttaattttacgaccgatcagctatttatgttgactgcgctgcctagcgtttctggcgcgttattacgtgttccatactcctttatggttcctatcttcggtggtcgtcgctggacggcgttcagcaccggtattctgattattccttgcgtctggctgggttttgccgtgcaggatacctccacgccttatagcgtcttcatcatcatctctctgctatgcggctttgctggcgcgaacttcgcatccagtatggcaaacatcagcttcttctttccgaaacagaagcagggtggcgcgctgggtctgaatggtggtctgggaaacatgggcgtcagcgtcatgcagttggttgctccgctggtggtaagtctgagcattttcgcagtatttggtagccagggcgtcaaacagccggatgggactgagctgtatctggcgaatgcgtcctggatatgggtgccgttccttgccatcttcaccattgcggcgtggtttggcatgaacgatcttgctaccagcaaagcctccatcaaggagcagttgccggtactcaaacggggtcatctgtggattatgagcctgctgtatctggcaaccttcggctccttcatcggcttctccgcgggctttgcaatgctgagtaaaacgcagttcccggatgttcagattctgcaatacgctttcttcgggccgtttattggtgcgctggcgcgttctgcaggtggtgcattatctgaccgtctgggcggaactcgtgtcacgctggtgaactttattctgatggcgattttcagcggcctgctgttcctgaccttaccgactgacgggcagggcggaagcttcatggcgttcttcgcggtcttcctggcgctgttcctgacagctgggctgggtagtggttccactttccagatgattagtgtgatcttccgtaaactgacaatggatcgcgtgaaagcagaagggggttctgacgaacgtgcgatgcgtgaagcggcaaccgacacggcggcggcgctgggtttcatctctgcgattggcgcgattggtggcttctttatcccgaaagcgtttggtagcagcctggcattaacgggtagcccagtcggcgcaatgaaggtatttttgattttctatatcgcctgcgtagtgattacctgggcggtatatggtcggcattctaaaaaataaaccgttactcgtcatacttcgggttacatgtgctgcggctgcgttcattcaccccagtcacttactttagtaagctcctgggattcattcacttgccgccttcctgtaaaccgaattatatagagtaaaatatttgattatcctttgcgcggcatgatgtcgcgctttttttatgcgtcatttagttacaacatactaatgttatatggtttatttcgccggatttcattaagagccattaatatgttacccatggggaatactccttaatacccatctgcataaaaatcttaatagtttaaataactacaggtataaaacgtcttaatttacagtctgttatgtggtggctgttaattatcctaaaggggtatcttaggaatttactttatttttcatccccatcactcttgatcgttatcaattcccacgctgtttcagagcgttaccttgcccttaaacattagcaatgtcgatttatcagagggccgacaggctcccacaggagaaaaccgatgagtaaattcctggaccggtttcgctacttcaaacagaagggtgaaacctttgccgatgggcatggccagcttctcaataccaaccgtgactgggaggatggatatcgccagcgttggcagcatgacaaaatcgtccgctctacccacggggtaaactgcaccggctcctgcagctggaaaatctacgtcaaaaacggtctggtcacctgggaaacccagcagactgactatccgcgtacccgtccggatctgccaaaccatgaacctcgcggctgcccgcgcggtgccagctactcctggtatctttacagtgccaaccgcctgaaatacccgatgatgcgcaaacgcctgatgaaaatgtggcgtgaagcgaaggcgctgcatagcgatccggttgaggcatgggcttctatcattgaagacgccgataaagcgaaaagctttaagcaggcgcgtggacgcggtggatttgttcgttcttcctggcaggaggtgaacgaactgatcgccgcatctaacgtttacaccatcaaaaactacggcccggaccgtgttgctggtttcagcccaattccggcaatgagcatggtttcttacgcaagcggtgcacgctatctcagcctgattggcggtacttgcttaagcttctacgactggtactgcgacttgcctcctgcgtctccgcaaacctggggcgagcaaactgacgtaccggaatctgctgactggtacaactccagctacatcatcgcctgggggagtaacgtgccgcagacgcgtaccccggatgctcacttctttactgaagtgcgttacaaagggaccaaaactgttgccgtcacaccagactacgctgaaatcgccaaactgtgcgatctgtggctggcaccgaaacagggcaccgatgcggcaatggcgctggcgatgggccacgtaatgctgcgtgaattccacctcgacaacccaagccagtatttcaccgactatgtgcgtcgctacaccgacatgccgatgctggtgatgctggaagaacgcgacggttactacgctgcaggtcgtatgctgcgcgctgctgatctggttgatgcgctgggccaggaaaacaatccggaatggaaaactgtcgcctttaataccaatggcgaaatggttgcgccgaacggttctattggcttccgctggggcgagaagggcaaatggaatcttgagcagcgcgacggcaaaactggcgaagaaaccgagctgcaactgagcctgctgggtagccaggatgagatcgctgaggtaggcttcccgtactttggtggcgacggcacggaacacttcaacaaagtggaactggaaaacgtgctgctgcacaaactgccggtgaaacgcctgcaactggctgatggcagcaccgccctggtgaccaccgtttatgatctgacgctggcaaactacggtctggaacgtggcctgaacgacgttaactgtgcaaccagctatgacgatgtgaaagcttataccccggcctgggccgagcagattaccggcgtttctcgcagccagattattcgcatcgcccgtgaatttgccgataacgctgataaaacgcacggtcgtagcatgattatcgtcggtgcggggctgaaccactggtatcacctcgatatgaactatcgtggtctgatcaacatgctgattttctgcggctgtgtcggtcagagcgggggcggctgggcgcactatgtaggtcaggaaaaactgcgtccgcaaaccggctggcagccgctggcgtttgcccttgactggcagcgtccggcgcgtcacatgaacagcacttcttatttctataaccactccagccagtggcgttatgaaaccgtcacggcggaagagttgctgagtccgatggcggacaaatcccgctataccggacacttgatcgactttaacgtccgtgcggaacgcatgggctggctgccgtctgcaccgcagttaggcactaacccgctgactatcgctggcgaagcggaaaaagccgggatgaatccggtggactatacggtgaaatccctgaaagagggttccatccgttttgcggcagaacaaccagaaaacggtaaaaaccacccgcgcaacctgttcatctggcgttctaacctgctcggttcttccggtaaaggtcatgagtttatgctcaagtacctgctggggacggagcacggtatccagggtaaagatctggggcaacagggcggcgtgaagccggaagaagtggactggcaggacaatggtctggaaggcaagctggatctggtggttacgctggacttccgtctgagcagcacctgtctctattccgacatcattttgccgacggcgacctggtacgaaaaagacgacatgaatactagcgatatgcatccgtttattcacccgctgtctgcggcggtcgatccggcctgggaagcgaaaagcgactgggaaatctacaaagccatcgcgaagaaattctccgaagtgtgcgtcggccatctgggtaaagaaaccgacatcgtcacgctgcctatccagcatgactctgccgctgaactggcgcagccgctggatgtgaaagactggaaaaaaggcgagtgcgacctgatcccaggtaaaaccgcgccacacattatggtcgtagagcgcgattatccggcgacttacgaacgctttacctctatcggcccgctgatggagaaaatcggtaatggcggtaaagggattgcctggaacacccagagcgagatggatctgctgcgtaagctcaactacaccaaagcggaaggtccggcgaaaggccagccgatgctgaacaccgcaattgatgcggcagagatgatcctgacactggcaccggaaaccaacggtcaggtagccgtgaaagcctgggctgccctgagcgaatttaccggtcgtgaccatacgcatctggcgctgaataaagaagacgagaagatccgcttccgcgatattcaggcacagccgcgcaaaattatctccagcccgacctggtctggtctggaagatgaacacgtttcttacaacgccggttacaccaacgttcacgagctgatcccatggcgtacgctctctggtcgtcagcaactgtatcaggatcaccagtggatgcgtgatttcggtgaaagcctgctggtttatcgtccgccgatcgacacccgtagcgtgaaagaagtgataggccagaaatccaacggcaaccaggaaaaagcgctcaacttcctgacgccgcaccagaagtggggtatccactccacctacagcgacaacctgctgatgctgactttaggtcgcggtggtccggtggtctggttgagtgaagccgatgccaaagatctgggtatcgccgataacgactggattgaagtcttcaacagcaacggtgctctgactgcccgtgcggttgtcagccagcgtgttccggcagggatgaccatgatgtaccacgcgcaggaacgtatcgttaacctgcctggtagcgaaattacccaacagcgtggtggtatccataacagcgtcacccgtatcacgccgaaaccgacgcatatgatcggcggctatgcccatctggcatacggctttaactactatggcaccgtaggttctaaccgcgatgagtttgttgtagtgcgtaagatgaagaacattgactggttagatggcgaaggcaatgaccaggtacaggagagcgtaaaatgaaaattcgtagtcaagtcggcatggtgctgaatctcgataagtgcatcggctgccacacctgtagtgttacctgtaaaaacgtctggaccagccgtgaaggcgtggaatatgcgtggttcaacaacgtggaaaccaagccgggccagggcttcccgactgactgggaaaaccaggaaaaatacaaaggcggctggatccgtaaaatcaacggcaaactgcagccgcgcatgggtaaccgtgccatgctgctgggtaaaatcttcgctaacccgcatctgccggggatcgacgattattacgagccgttcgattttgactatcagaacctgcataccgcgccggaaggcagcaaaagccagccgattgcccgtccgcgtagcctgattaccggggaacggatggcgaaaatcgaaaaagggccgaactgggaagatgacctgggcggtgagtttgacaaactggcgaaagacaagaacttcgacaacatccagaaggcgatgtatagccagttcgaaaacaccttcatgatgtatttgccgcgcctgtgcgaacactgcctgaacccggcatgtgtggcgacctgcccgagcggtgcgatttacaagcgtgaagaagatggcatcgtcctgatcgaccaggataaatgccgtggctggcgtatgtgcatcactggatgcccgtacaaaaaaatctacttcaactggaagagcggtaagtctgagaagtgcatcttctgctatccgcgtattgaagcgggtcagccgaccgtgtgcagtgaaacctgtgtcggtcgtatccgttatcttggcgtgctgttgtacgatgccgacgctattgaacgtgcagccagcaccgagaacgagaaagatctttaccagcgtcagctggacgtgttcctcgatccgaacgatccgaaagtcatcgagcaggcgattaaagacggtattccgctgagcgttattgaagccgcacagcagagcccggtttataaaatggcaatggaatggaaactggcgctgccgctgcatccggaatatcgcacactgccgatggtctggtacgtgccgcctctgtctccgattcagtctgcagcagacgcgggtgagctgggtagcaacggcattctgccagacgtcgaaagcctgcgtattccggtacagtatctggcgaatctgctgaccgccggtgataccaaaccggtactgcgcgcactgaaacgtatgctggcgatgcgtcattacaaacgtgctgaaaccgttgacggtaaagttgatacccgtgcgctggaagaggtcggtctgaccgaagcccaggcacaggagatgtaccgttatctggcgattgctaactacgaagatcgctttgtggtgccgagtagtcatcgtgaactggcacgggaagccttcccggagaaaaatggctgcggctttacctttggtgatggctgccacggtagtgataccaaattcaatctgttcaacagccgtcgtatcgatgccatcgatgtgaccagcaaaacggagccgcatccatgatcgaactcgtgattgtaagccgtctccttgaatatccggatgctgccttatggcagcatcaacaagagatgtttgaggcgattgccgcgagcaaaaatctgccaaaagaggatgcccatgcgctgggcattttcctgcgcgatttaacgacgatggatccgctcgatgcccaggcgcagtacagcgaactgttcgaccgtggccgcgccacgagtctgttgctgtttgaacatgtgcacggcgaatcccgcgaccgcggccaggcgatggtggacctgctggcgcagtacgagcagcacggcttgcagttaaacagccgcgaattgccggaccatctgccgctgtatctggagtacctggcgcagctgccgcaaagcgaagccgtggaaggtttgaaagatatcgcgccgattctggcattgctgagcgcgcgtctgcaacagcgtgaaagccgttatgccgtgctgtttgatctgctgctgaaactggcgaataccgctatcgacagcgacaaagtggcggaaaaaattgccgacgaagcgcgcgatgatacgccgcaggcgctggatgctgtctgggaagaagagcaggttaaattctttgctgacaaaggctgcggtgatagtgcaatcactgcgcatcagcgtcgctttgccggtgccgtcgcgccgcaatatctgaatatcaccaccggaggacagcactaatgcaattcctgaatatgttcttctttgatatctacccgtacatagccggggcggtcttcctgattggtagctggctgcgttatgactacgggcagtacacctggcgcgcggcgtccagccagatgctggatcgcaaagggatgaacctggcgagcaacctgttccatatcgggattctggggatttttgtcggtcacttcttcggtatgctgacgccgcactggatgtatgaagcctggctgccgattgaagtgaaacagaaaatggcaatgtttgctggtggtgccagcggcgtgctgtgtctgattggcggcgtgctgttgctgaaacgtcgtctgttcagcccacgcgtgcgtgcaaccactaccggagcggatatcctgatcctgagcctgctcgttatccagtgcgcgctgggcctgttgaccattccgttctccgctcagcatatggacggtagcgagatgatgaaactggttggctgggcgcagagcgtggtgaccttccacggtggcgcttctcaacacctcgatggtgtggcgtttatcttccgtctgcacctggtgctggggatgacgttattcctgctgttcccgttcagccgtctgatacacatctggagcgtaccggtggagtatctgacacgtaagtaccagctggtgcgcgctcgtcactaagcgaattttagttcacatagaccctgcttcggcggggtttttttatgggcacggtgcggggtgagttgtcggatgcgcttcgcttatccgacctacaggggaggatattgtaggcccggtaaacgtggtgccatcgggcaaaattagctcggagtaacaggttttgattatttaaggaagcgatggtggtgggggaaggattactcagcgctgcgcgcttcgcccttcgggtcgttgcctgcggcaacgctctcagcctggcgctcaagagcaaccttggtcgaagcttcagttccttccccgcttgggcagaatatttgattgcggatagctttgagaattccggggcttttgaaagtgatggtggtgggggaaggattactcagcgctgcgcgcttcgccctagcggtcgttgcctgcggcaacgctctctcgctgacgctcgagccgaaccttaatcgaagcttctcatccttccccgcatgggcagaatatttgattgcggattcgcttgagagttcagggacttttgaaagtgatggtggtgggggaaggattactcagcgctgcgcgcttcgcccttcgggtcgttgcctgcggcaacgctctctcgctggcgctcgagtgctaccttggtcgaagcttctcatccttccccgcatgggcagaatatttaattgcggattcgttgggaagttcagggacttttgaaagtgatggtggtgggggaaggattcgaaccttcgaagtcgatgacggcagatttacagtctgctccctttggccgctcgggaaccccaccaggggtaattcaaattttgaggtaatgcttgagatggtggtgggggaaggattattcgtcgcttcgctcctcacccttcgggccgttgcctgtggcaacgttctctcgctttcgctcgaatcgaaccttagtcgaaggttctcacccttccccgatgagtgcaaactttcacaatctcaccgaagttaccacatcgctgtggtgaattatggtggtgggggaaggattcgaaccttcgaagtcgatgacggcagatttacagtctgctccctttggccgctcgggaaccccaccacggggtaatgctttttactggcctgctcccttatcgggaagcggggcgcatcatatcaaatgacgcgccgctgtaaagtgttacgttgagaaaaatgaactggttgcgtaattttcatccgtaacggattaaaggtaaccagttatttttgctggcgattaaagaataatcgttcgattaccgtaaacaaagacgcgctgtgccagtactttgtatagtgcacgacttaagacgtttttctcgacgtcacgacctgcgcgcatcatatcttcagctgtgtaggtatgatcgacatgaataacgtcctgcatgatgattgggccttcgtccagattgtcattcacatagtgagcggttgcgccaataatcttcacaccacgttcataggcctggtgataaggacgtgcgccaataaacgctggcaggaaactatggtgaatattgatgatcttattcgggaagcgtgccacaaattccggcgttaatacccgcatatacttcgccagcaccacgtagtcaggttgataagcatcaatggcatccgccatcttttgatcgtgctcgttgcgggttaacccttcatggcttaccagctcaaacggaatatcaaaacgctcaaccagagaacgtaaagtatcgtggttaccaataactgccgcgatttcgacatccaggccgccgtaattggctttcatcaacaaatcgccaaggcaatgcgcttctttagtgaccagaatcactatccggcgacgaccggcaggattcagctcacgcacggagccttctggcaatgcgctatcgagatccgccagcagggtggaatcattaaaaatcccttccagttccgtgcgcataaaaaagcgcccggtacggtgatcaacaaattcattgttctgtacgatatttaactcgtgcttgtagcaaatattggtaatacgtgcgatcagacctttttggtccggacaaatagtacgcagaactttacgttggagactatgcattgctggaaaaaccttgttgagagtgtttgctaaaccgtaccgtcaaccattattggccgcagcactttttaaattttttaccactaccacaagggcagggatcgttgcgaccaaactgcggacgtgtaccgtcaatatagtaccattgaccgttttctttcaaaaatcggctacgttcaattattgcacctgttttaccaccttcggtaaatcgagcaacaaaactgacaaatccgatattgtcggcgtcctgccaacaatgttcaaatacggtcaatcccaaccattcagtatgcgcaaatccggccatcaattcggcacgtaacgccgctgctccacaagagggatgccaggtctttattaaataatctgcgtcttgcatcacaaaagcgcagtaacggctacgcatgagatgttctggatcaggtgcaaccttttcaccagacacataagggtggcaacataggctatactcgacagcactaccacagggacaaagctgagacacaaataatctccctggaaacaataacggcgtattaaccgcctgagtagcactatgttaaccgagcagtagcgatgtggctacgattgcattccaggggaatcttgcgggaataatgagaaagataaaaatagggctggcgctgggatctggcgcggcgagaggttggagccatattggcgttattaatgcgctaaaaaaagtgggtattgaaattgatatcgttgcaggatgtagtattggtagcctggtgggcgctgcctatgcatgcgatcgattatctgcgctggaagattgggtgacctctttcagttattgggatgttttacgcctgatggatctctcctggcagcgcggtgggttactgcgcggcgagcgtgtcttcaatcaataccgcgaaataatgccggaaacagagatcgaaaattgttcccgtcgctttgcggctgttgccaccaatttaagtacgggacgtgaattatggtttactgaaggcgatctccatcttgctattcgcgcaagttgcagtattccaggactcatggcacctgttgcacataacggctactggctggttgatggagcagtcgttaacccaattcctatttccctcacgcgtgcattgggggctgatattgtgatagcggttgacctgcagcacgatgctcatttgatgcaacaagatttgctctcctttaatgtcagtgaagaaaatagcgagaatggtgattctctgccgtggcatgcgcgtctgaaagaaaggttaggcagcataacgacacgtcgggcggtgacagcgccaacggcaacagagattatgaccacttctatccaggtgctggagaaccgccttaaaaggaaccgcatggcaggtgatccgcccgatattctgattcaacctgtttgcccgcaaatatctacgcttgatttccatcgcgcgcacgctgccattgcggccggacagctggcagtggaaaggaaaatggacgaacttttgccgttggtacgcaccaacatttgaccagaatttttatctacacttaagttaattctgacaggcgcaggtggcaatagcatgccactattgagtaaagccagtcaggggagagaacatgacgcagccattggtcggaaaacagattctcattgttgaagatgagcaggtatttcgcagccttctggatagttggttttccagtttgggagcgacaacggtactggcggctgatggggtggatgcccttgagttgctgggaggtttcactccagacctgatgatatgtgatatcgcgatgccacgaatgaacgggcttaaactgctggagcatatacgtaacagaggcgaccagaccccagttctggtgatatctgccactgaaaatatggcagatattgccaaagcgttacgtctgggcgttgaagatgttttgctgaaaccagttaaagatctgaatcgcttgcgcgagatggtttttgcctgtctctatcccagcatgtttaatagccgcgttgaggaagaggaaaggctttttcgcgactgggatgcaatggttgataaccctgccgcagcggcgaaattattacaggaactacaaccgccggttcagcaggtgatttcccattgccgggttaattatcgtcaattggttgccgcggacaaacccggcctggtgcttgatattgccgcacttagcgaaaacgatctggcattttattgccttgatgtcacccgagctggacataatggcgtacttgctgccttgttattacgcgcattgtttaacggattattacaggaacagcttgcacaccaaaatcaacggttgccagagttgggcgcgttattgaagcaggtaaaccatttacttcgtcaggccaatctgccggggcagtttccgctattagttggctattatcatcgcgaactgaaaaatctcattctggtttctgcgggtctgaatgcgacgttaaataccggcgaacaccaggtgcaaatcagtaatggtgttccgttaggcactttaggtaacgcttatttgaatcaattgagccagcgatgcgatgcctggcaatgccaaatatggggaaccggtggtcgactgcgcttgatgttgtctgcagaatgagcaaacgataacgcgggctaaatttgcattacctgctaatgtcggctggtggtactatcgtcgccattcgtataagtaattgtcttaattatgctaactcgcctccttttcagaacttagccccttcggggtgctgatatactgggatgcgatacagaaatatgaacacgttcaaaacacgaacagtccaggagaatttaaatggctgccattaatacgaaagtcaaaaaagccgttatccccgttgcgggattaggaaccaggatgttgccggcgacgaaagccatcccgaaagagatgctgccacttgtcgataagccattaattcaatacgtcgtgaatgaatgtattgcggctggcattactgaaattgtgctggttacacacagttctaaaaactctattgaaaaccactttgataccagttttgaactggaagcaatgctggaaaaacgtgtaaaacgtcaactgcttgatgaagtgcagtctatttgtccaccgcacgtgactattatgcaagttcgtcagggtctggcgaaaggcctgggacacgcggtattgtgtgctcacccggtagtgggtgatgaaccggtagctgttattttgcctgatgttattctggatgaatatgaatccgatttgagtcaggataacctggcagagatgatccgccgctttgatgaaacgggtcatagccagatcatggttgaaccggttgctgatgtgaccgcatatggcgttgtggattgcaaaggcgttgaattagcgccgggtgaaagcgtaccgatggttggtgtggtagaaaaaccgaaagcggatgttgcgccgtctaatctcgctattgtgggtcgttacgtacttagcgcggatatttggccgttgctggcaaaaacccctccgggagctggtgatgaaattcagctcaccgacgcaattgatatgctgatcgaaaaagaaacggtggaagcctatcatatgaaagggaagagccatgactgcggtaataaattaggttacatgcaggccttcgttgaatacggtattcgtcataacacccttggcacggaatttaaagcctggcttgaagaagagatgggcattaagaagtaacatccgtatcggtgttatccacgaaacggcgttgagcaatcgacgccgtttttttatagcttattcttattaaattgtcttaaaccggacaataaaaaatcccgccgctggcgggattttaagcaagtgcaatctacaaaagattattgcttgatcaggaaatcgtcgagggatttaccttgctcatccattgcttttttgattacagctggagtacggccttggccagtccaggttttagtttcgccgttttcgtcaacgtagctatattttgccggacgctgagcacgtttagctttggtgccagatttaacggcagcaaggctattcagcagttcgttcgggtcaataccgtcagcgatcagcatttcgcgatattgctgcagtttacgagtgcgctcttcaacttcagcagcagccgcgctttcttcttcgcgacgttcgttaacaacaacttctaatttttccagcatttcttccagcgtttcaagtgtacattctcttgcctgcgcacgaagagtacggatgttgttcagaattttaagtgcttcgctcattgtagtaatctcaaacttatattggggtggtttgttgaggtaataatagagccttaaattcagttgtgcaatagccaggaatgtaaggaattcaaaattgttctttattttgtgccgccaataaatatcttttcataaaattagccagaaaagacgcggcatatagccctatttacaccgatgatttcgcagcacgtgaggttaaaacttcctgattcatgtcacattttatggggagattatcgtaggctgacgacctttcagtcttctgtattagttgtgtttacgagaattccctattaagcgaatgatgaaaagtagaacagtcgcaataagagcatggacttagtattgcactatctcctggaggtcaacagagggctattacttgcgcaacaggttaaagattgtgaatagttaccagcagtcatttacccgcttataacaagcgaggcagttgtaatgatagctcagaaggattatgcaaggcttcgtaagggagaacgcatatacccacttctgtgcatactgttgagctgaaaaactgacgaattatgataaactccagccaactttatttcatatcattgagggcctgtggctgatggcacagctatatttctactattccgcaatgaatgcgggtaagtctacagcattgttgcaatctagttacaattaccaggaacgcggcatgcgcactgtcgtatatacggcagaaattgatgatcgctttggtgccgggaaagtcagtagccgtataggtttgagtagccctgcaaaattatttaaccaaaatagtagtttatttgatgagattcgtgcggaacatgaacagcaggcaattcattgcgtactggttgatgaatgccagtttttaaccagacaacaagtatatgaattaagcgaggttgtcgatcaactcgatatacccgtactttgttatggtttacgtaccgattttcgaggtgaattatttattggcagccaatacttactggcatggtccgacaaactggttgaattaaaaaccatctgtttttgtggccgtaaagcaagcatggtgctgcgtcttgatcaagcaggcagaccttataacgaaggtgagcaggtggtaattggtggtaatgaacgatacgtttctgtatgccgtaaacactataaagaggcgttacaagtcgacagtttaacggctattcaggaaaggcatcgccacgattaataagaatttctttactgacagggtgagcagggcacttttatcctgtcagttcgttttacgcacttcttccgggctatatacccttctcggcagttttttaacgccgctatacgcctcacagggctcttaagcaccgacgttgacttgtgacctgtaaagtacaatatccctgtgtttaggcgttatacatcgtcgcaaatatgatgaaggctaatgctgtcggtttatggaaaagttgctttgggtaaacaaaaaatacggccccagaagggcaatgccgttcacttaagaggagcggcactatgtttcacaggataacgggtttttgatatcttaaccgacctcggccttgatggtcgggggcgttttgttatgaacaccacttccagagcaccccgaagatgctccagtcgtttcgggatggtccctggtgacgccgtgtttcccagctctatcatttctgatgcgatattcttccacgcaggcagtagccagtggcggttacaacccttctggttcagcgtcagcagcaggtcttcgctgtaaaaaagtttatcaaacaacgtaatagagttatccgggatggtggcgagcatggagtgggccagcacagtttcgctctgccggtaaggtgcggtcacggcattcagcagaatgtgacttcccaggttcattaaggccaccagacgcataaccgggtaggcgttctgccgcttagtggatgtgttggcagacccataatattcacgcagctcgggtttatcaggtgtcctgaactgtgcgccatcaatggcaaaaagttgcaggccgtgccagtcatccttcaggtaacgttccgcgcccctgtctgtgcggtctggcggaagagccattccactggggcggcccccacgcgctgacgcgcctgggtgacagcgctgcgggccagcaggttcatccccgcttcgccatccgcgctcaggttcagacggcgaacaacatcggtaattggctcattgcaccaccatccagataaccatgtcccccggtaaacgacggcggcgaacggtcgcatgagcagaaagcgtcaggcagtgttgtatccactcggtgggaaggtgttctgcaaatagttgtgcagagggcggaggcataagcggatggtcactgaaatcgagcagatcattgagaagtggcataagaaaacggctccctgttgtggaagccgttatagtgcctcagtttaaggatcggtcaactaatccttaactgatcggcattgcccagaaggggccgtttatgttgccagacagcgctactgattaagcggattttttcgcttttttctcagctttagccggagcagcttctttcttcgctgcagtttcaccttctacataatcacgaccgtagtaggtatccagcagaatctgtttcagctcggagatcagcgggtaacgcgggttagcgccggtgcactggtcatcgaatgcatcttcagacagtttatccacgttcgccaggaagtctgcttcctgaacgccagcttcacggatagatttcggaatacccagttcagctttcagcgtttccagccatgccagcagtttctcgatcttagcagcagtacggtcgcccggtgcgctcagacccaagtggtcggcaatttcagcataacgacggcgagcctgcggacggtcatactggctgaatgcagtctgcttggtcgggttgtcgttcgcattgtagcgaataacgttacaaatcagcagggcgtttgccagaccgtgcggaatatggaactgggaacccagtttgtgcgccatactgtgacatacacccaggaaggcgttcgcaaacgcgatacccgcgatagtcgctgcactgtgaacacgttcacgcgctaccggatttttagacccttcgtggtaggacgctggcagatattctttcagcagtttcagtgcctgcagagcctgaccatcagagaactcagatgccagtacagaaacataagcttccatggcgtgagttactgcgtccagaccaccgaaagcacacagggacttcggcatgtccataaccaggttggcgtcgacaatcgccatatccggagtcagcgcatagtctgccagcggatatttctgaccagtagcgtcgtcagttacaaccgcaaacggagtgacttcagaacctgtaccagaagtggtggtgacagcgatcattttcgctttcacgcccattttcgggaacttgtagatacgtttacggatatccataaagcgcagcgccagctcttcgaagtgagtttccggatgttcgtacataacccacatgatcttcgcggcgtccatcggggaaccaccacccagcgcgataatcacgtctggtttgaaggagtttgccagttctgcacctttacgaacgatgctcagggtcgggtccgcttctacttcgaagaagacttcagtttcaacgcctgctgctttcagtacggaagtgatctgatcagcataaccattgttgaacaggaagcggtcagtcacgatgagcgcacgtttgtggccatcagtaatcacttcatccagcgcgattggcagggagccacggcggaagtagatagatttcggaagtttgtgccacaacatgttttcagctcgcttagcaacggttttcttgttgatcaggtgtttcggaccaacgttttcagagatggagttaccaccccaagaaccacaacccagagtcagggaaggtgcgagtttgaagttatacaggtcaccgataccaccctgagacgctggggtgttaatcaggatacgcgccgttttcattttctgaccgaagtaagaaacgcgagccggttggttatcctggtcagtgtacaggcaagaggtatgaccgataccgcccatagcaaccagtttctctgctttttctaccgcgtcttcgaaatctttagcgcggtacattgccagagtcggggacagtttttcatgtgcgaacggttcgctttcatcaacaacggtcacttcaccgatcagaatcttggtgttttctggtacagagaagcctgccagttcagcaattttataggctggctgaccaacgatagccgcgttcagcgcaccgtttttcaggataacatcctgaacagctttcagctctttaccctgcaacagatagccgccgtgggttgcaaaacgttcacgtacagcgtcataaacagagtcaacaacaacaacagactgttcagaagcacagattacgccgttgtcgaaggttttggacatcagtacagatgcaactgcacgtttgatatcagcagtttcatcgataacaactggagtgttgcccgcgcctacaccgatagctggtttaccggagctgtatgcggctttaaccatgcccggaccaccagtcgcgaggatcaggttgatgtctgggtggtgcatcagtgcgttagacagttcaacagaaggttgatcgatccagccgatcagatctttcggagcaccggcagcgatagcagcctgcagaacgatatcagccgctttgttggtggcatcttttgcacgcgggtgcggggagaagataatggcgttacgggtcttcagactgatcaggcttttgaagatagcagtactagtcgggttagtggtcggaacgataccgcaaataataccgattggttcagcgatagtgatggtaccaaaagtgtcgtcttcagacagaacaccacaggttttttcatctttataggcgttgtagatatattcagaagcaaagtggtttttgatcactttatcttcgacgatacccatgccggattcggcaacggccattttcgcgagtgggattcgagcatctgcagcagccagagcggcggcgcggaagattttgtctacttgctcttgagtgaaactggcatattcacgctgggctttttttacacgctctacgagtgcgttaagttcagcgacattagtaacagccataatgctctcctgataatgttaaacttttttagtaaatcatctgctcgaatacgagagtatagtcagtgcggtgatgatttgcttaacctatgaaaatcaaaagcttactcgcgctcacactcactgtgatttactaaaagagtttaaacattagagttattatctctaatgcgtcacttccaggtggcgtaagcaagattactcacttctgggtactgattacgtgatccaaatcaaatttttgcaaagctgacacctttcagcatcgcttttcgccattatagctaacagttaataaattgtagtatgatttggtggctacattagcatgttttgcacaactagataacaataacgaatgatagcaattttaagtagttaggaggtgaaaaatgctgtcaaaaggcgtattgtcagcgcgtcttttcaaccttatttatggctaacattatccggcttttgcttcggagctaaccgtgattcagaccttttttgattttcccgtttacttcaaatttttcatcgggttatttgcgctggtcaacccggtagggattattcccgtctttatcagcatgaccagttatcagacagcggcagcgcgaaacaaaactaaccttacagccaacctgtctgtggccattatcttgtggatcagcctttttctcggcgacacgattctacaactttttggtataagtattgatagcttccgtatcgccgggggtatcctggtggtgacaatagcgatgagcatgatcagcggcaagcttggcgaggataaacagaacaagcaagaaaaaagtgaaaccgcggtacgtgaaagcattggtgtggtgccactggcgttgccgttgatggcggggccaggggcgatcagttctaccatcgtctggggtacgcgttatcacagcattagctatctgtttggtttctttgtggctattgcattgttcgctttatgttgttggggattgttccgcatggcaccgtggctggtacgggttttacgccagaccggcatcaacgtgattacgcgtattatggggctattgctgatggcattggggattgaatttatcgttactggtattaaggggattttccccggcctgcttaattaattcctttcaaatgaaacggagctgccatgctccgtttacttcgtcattatttttactttgttcccgcgcagttatcaaaagcaaaaggaataggtaaaaatattcttctcaaattacagttagttataaggatttccttaactgcttctcctcaccatcatgttattttcgccacatcataatcctgggcttgctgaagaataattgaaatgatattattaattccactgcctttggtagaggaaagtgctaaataataatcaattgttaaattattgtgcatttcactactggaactgtaatcagaaaagatagacatgcttagccaatctctatttgattgaattgaaagatgtttgttaaggcatggatgcaagctatagattctgatacggtcaataaaagagaattgcttaacaattttgcaaaatgtattggcgagtaagaaccgcatttggtactttccgggcaaccgccagacgattctttattggtaatgagaataattaacaattaaagagcgtcgcgaaagaataatgtgtctcgacaggggagacacagtacgaatcgacataaggtgatcgtctgaatcaccagaataaataaagtcggtgatagtaatacgtaacgataaagtaacctgacagcagaaagtctccgagcctgtgcagggtcccaatccgggattacacatgctggttaataccagtaattataatgagggagtccaaaaaacaatgaccaacatcaccaagagaagtttagtagcagctggcgttctggctgcgctaatggcagggaatgtcgcgctggcagctgatgtacccgcaggcgtcacactggcggaaaaacaaacactggtacgtaacaatggtagtgaagttcagagtttagatccgcacaaaattgaaggtgttccggagtctaatatcagccgagacctgtttgaaggcttactggtcagcgatcttgacggtcatccagcacctggcgtcgctgaatcctgggataataaagacgcgaaagtctggaccttccatttgcgtaaagatgcgaaatggtctgatggcacgccagtcacagcacaagactttgtgtatagctggcaacgttctgttgatccgaacactgcttctccgtatgccagttatctgcaatatgggcatatcgccggtattgatgaaattcttgaagggaaaaaaccgattaccgatctcggcgtgaaagctattgatgatcacacattagaagtcaccttaagtgaacccgttccgtacttctataaattacttgttcacccaagtactagtccggtgccaaaagccgctatcgagaaattcggcgaaaaatggacccagcctggtaatatcgtcaccaacggtgcctataccttaaaagattgggtcgtaaacgaacgaatcgttcttgaacgcagcccgacctactggaacaacgcgaaaaccgttattaaccaggtaacctatttgcctattgcttctgaagttaccgatgtcaaccgctaccgtagtggtgaaatcgacatgacgaataacagcatgccgatcgaattgttccagaagctgaaaaaagagatcccggacgaagttcacgttgatccatacctgtgcacttactattacgaaattaacaaccagaaaccgccattcaacgatgtgcgtgtgcgtaccgcactgaaactaggtatggaccgcgatatcattgttaataaagtgaaagcgcagggcaacatgcccgcctatggttacactccaccgtatactgatggcgcaaaattgactcagccagaatggtttggctggagccaggaaaaacgtaacgaagaagcgaaaaaactgctggctgaagcgggttataccgcagacaaaccgttgaccatcaacctgttgtataacacctccgatctgcataaaaagctggcgattgctgcctctagtttgtggaagaaaaacattggtgtaaacgtcaaactggttaaccaggagtggaaaacgttcctcgacacccgtcaccagggtacttttgatgtggcccgtgcaggctggtgtgctgactacaacgaaccaacttccttcctgaacaccatgcttagcaacagcagcatgaataccgcgcattataagagcccggcctttgacagcattatggcggaaacgctgaaagtgactgacgaggcgcagcgcacagctctgtacactaaagcagaacaacagctggataaggatagcgccattgttcctgtttattactacgtgaatgcgcgtctggtgaaaccgtgggttggtggctataccggcaaagatccgctggataatacctatacccggaatatgtacattgtgaagcactaatggcaatacgtggggcaggagtgtcctgctccacggtgtctgatttttatcgcattacagaaggcacaggccagaaggtagggcaatgttaaaatttattctacgtcgctgtctggaagcgattccgacgctatttattcttattactattagcttctttatgatgcgcctcgcgccgggaagcccttttaccggcgaacgtactttaccgccagaagtgatggccaatatcgaagcgaaatatcatcttaatgatccgatcatgacacagtatttcagctacctgaaacaactggcgcacggtgatttcggtccaagctttaaatataaagattatagcgtcaatgacttggttgcatccagttttcccgtttctgccaaactgggagccgcagcatttttccttgcggtaatactgggtgttagtgctggcgttattgccgcattaaaacaaaacaccaaatgggactataccgtgatggggctggcaatgaccggggttgttatccccagttttgtggttgcaccattattagtcatgatatttgcgatcattttgcattggctgccgggcggtggctggaatggtggggcgcttaaattcatgatattgccgatggtggcgttgagtctcgcttatatcgccagtattgcgcgtattacccgtggctctatgattgaagtattacactccaattttattcgtactgcccgggcgaaagggttacctatgcggcggatcattttacgtcacgcattaaaacctgctctgttacccgtgctctcttatatgggccccgcatttgtcggcattattaccggttctatggttatcgaaaccatttatggtttgccggggattggacaactgttcgttaatggcgcattgaaccgtgactattccttagtgttaagcctgaccatcctggttggtgctttaaccattttgtttaatgccattgtcgatgtgctatatgcggttatcgacccgaaaatccgttactgatactggagctcgcgatgatgttaagtaagaaaaacagcgagacgctggaaaatttcagtgaaaagctggaggtcgaagggcgcagcttgtggcaggacgcacgtcgacgttttatgcataaccgtgcggcggttgccagtctgatagtgctggtgctgatcgcgttatttgtaatcctggcaccgatgctttcccagtttgcctatgacgatactgactgggcgatgatgtccagcgccccggatatggagtccggtcactactttggtactgacagttccggtcgcgacctgcttgtgcgcgttgcgattggcgggcgtatcagtctcatggtcggtgttgctgcggcactggtggctgtggtcgtcgggacactttatggtagcctttccggttatctgggcggtaaagtggatagcgtaatgatgcgtctgctggaaatcctcaactccttcccattcatgttcttcgtcattttgctggtgacctttttcggtcaaaacatcctgctgattttcgtggcgataggcatggtttcctggctggatatggctcgtattgtgcgtgggcaaaccctgagtctgaagcgcaaagagtttattgaggcggcacaagttggcggtgtaagcacaagcggcattgttattcgccacattgtgccgaatgtactcggtgtggtggtggtctacgcaagtcttctggtgcccagcatgatcctctttgaatctttccttagcttcctggggttgggtacgcaagagccgttaagcagctggggtgcattgctgagtgatggcgcgaacagcatggaagtctctccatggttattgttgttcccagcgggattcctcgtggtgacgctgttttgtttcaactttatcggcgatggcttgcgtgatgccctcgacccgaaagatcgttaaggagtgcagccatgagcgtaattgaaactgcaactgtgccgctcgcacaacaacaggctgacgcactgctgaacgtgaaagatttgcgtgtcacctttagtaccccggacggcgacgtcacggcggtcaatgatttgaatttttccctacgtgccggagaaacgctgggtattgtaggtgagtctggtagcggtaaaagccaaactgcatttgcgttgatgggcctgttggctgccaacggacgtattggcggaagcgcaaccttcaatgggcgtgaaatcctcaatttgccagagcatgaactcaataaactgcgcgctgaacaaatcagtatgatttttcaggacccaatgactagcttgaatccctatatgcgcgtcggtgagcagttgatggaagtgctgatgctgcataagaacatgagcaaagctgaggcgtttgaagagagcgtgcggatgctcgatgcggtaaaaatgccggaagcgcgtaaacgcatgaaaatgtacccgcacgaattttctggcggcatgcgtcagcgagtcatgattgcgatggccttgttatgtcgacctaagctgctgattgcggatgaaccaacaactgcgctggacgtcaccgtacaggcgcagatcatgacgctattaaatgaactgaagcgggaatttaataccgccatcattatgatcacccacgatcttgtcgtggtggcggggatctgcgacaaagtgctggtaatgtacgccgggcgcacgatggaatatggcaacgcgcgcgatgtcttttatcaacccgttcatccttattctatcggtttgctcaacgcggtgccgcgtctcgatgcggaaggtgaaacaatgttgaccatcccgggtaatccgccaaacctgctgcgattaccgaaaggttgcccgttccagccacgttgtccgcatgcgatggaaatttgtagtagcgcaccgccgctggaagagtttacgcctggccgtctgcgtgcttgctttaaaccggtggaggaactgttatgaatgctgtaactgaaggaagaaaagtcctccttgaaatcgccgatcttaaagtgcactttgaaatcaaagatggcaaacagtggttctggcaaccgccgaaaacgctcaaagccgtcgatggtgtcactcttcgcctgtatgaaggggaaacattaggtgtggtaggggaaagcggatgcggtaagtccacctttgctcgcgccatcatcggtttggtcaaggcgaccgacggtcatgttgcctggttaggtaaagagttgctgggcatgaaacccgatgaatggcgtgccgttcgcagtgatattcagatgattttccaggatccgttggcaagcctaaacccgcgtatgaccatcggcgagatcatcgctgaaccactgcgtacttatcatccgaaaatgagtcgccaggaagttcgcgagcgcgtgaaggcgatgatgctgaaagtcgggttattgcctaacctgattaaccgctatccgcatgagttctctggtgggcagtgccagcgtatcgggattgcgcgtgctcttattcttgaaccgaagctgattatctgtgatgagccggtgagcgcgctggacgtgagtattcaggcacaggtggtcaacctgctccagcaattgcaacgtgagatgggattgagtttaatttttatcgctcatgacctggccgtggtaaaacacatttccgatcgtgtgttggtgatgtatctcggccatgcggtagaactggggacctatgatgaggtctaccacaatccactacatccttacaccagggcattgatgagcgcagtccccatacctgatccggatctggagaagaacaaaaccatccagttactggaaggggaattaccgagcccgatcaacccgccttccggttgtgttttccgtacccgttgcccgattgccggtccagagtgcgccaaaacacgtcctgttctggaggggagtttcagacactccgtttcttgcctgaaagtcgatccgctttaaaaacaataagggctgacagttgtcagccctttttcacgctaaaagcgattatttattcccgccagatgatatggcaaagtttgtgatctttttcgcggcataacagaatgcgggcaaaaacatcgttgatttcaccatcttcactgtccgccagaccaatcaccacttcggcaaaaaagtccgggttcaaatcgaaatcaacatgttcctgccagtcttccgccggatcgaataactccgcgccgccgcgctcttcaaactgaagattgaacagcagaacatcagctggatcgagattgtcggcagccagttcgagaaaaatatcgtaggcctgttcaagcgtttcatcttcagtcaggcgattgtttagatccatatccatagttactacctgtttaacctctgttggcgacgttttacagcaacggactgaagaagtaaaacagtcgctcggcgacacgttgccataatggacgttttagccataaacgggcatcgagcagacgactacggctaatataatcgtcctgaacggcggcgaggtcagcaccaaaacctttatcgtcgattgccagggtaatctcgaaatttagccacagactacgcatatcaaggttaactgtgccaaccagacttagttcgccatcgaccagcacgctcttggtatgcagtaacccgccttcaaactgataaattttaaccccagcagccagcagttccgtaaagaatgcgcgactggcccagccgaccagcatgctgtcattttttcgcggaaggataatactgacatccaccccgcgctgcgccgccgtgcaaatcgcatgaagtaaatcatcgcttggcacaaagtagggcgtggtcatgatcaaatattcacgcgcgctataagccgcagtcaataatgcctggtgaatgagatcttccggaaagccggggccagaagcaattgtgtgaatggtgtgaccgctggcctgttcaaacggcataatattgacatctggtggtggcggcagaatacgttttccggtttcaatctcccagtcgcaggaataaataatccccatcgcggtggcgatagggccttccatacgcgccatcagatcaatccattgccctacgcccgcatcttgtttgaagtagcgaggatcgaccatattcatgctgccggtgtacgcgatgtaattatcgatcatgatcatcttgcgatgttggcgcaggtccatacggcgtaaaaacacacgcatcagattgacctttaaggcttcgaccacttcaataccggcattacgcattagctcgggccacgggctgcggaaaaaagccacactcccggcggagtcgagcatcaatcggcaatgaatgccgcgtcgcgcagccgccattaaactttcagccacctggtccgccatgccgccgggctgccagatataaaacaccatctcaatattatggcgcgcgagctggatgtcgcggattaacgcctgcatcacatcatcactctcggtcatcagttgtagctgattccctttgaccccagcgatcccctgacgacgctcgcaaagcttgaataatggcgcagcgacactgctattttcttcggcgaagatatgcttacaggctttaaggtcgttaagccattttgcggtggaaggccacatcgctctggcgcgctcagcgcggcgtttgcctaaatggagctcgccaacggcaagataggcaataattccgactaacggcagaatgtaaataatcaacagccaggccatcgcggagggaactgcgcgtcgtttcattagaatgcgtaaagttacgcctgcaatgagcaaccagtatcccagaatggccaaccaactcaccaacgtataaacggttgtcatagattagaaatccttttgaaagcgcattgttatgagtttacgcatatggattcatctggcaaataaaaacgcgggaaaagcactggtcagcgtcgggggtgggggtataatgaccattctgttattgcatagagtagttaacatgaagcggagtagaacggaagtggggcgctggcgcatgcagcgtcaggctagccgacgtaaatcgcgttggcttgaggggcaatcgcgccgaaatatgcgtatccacagcatcaggaagtgcattctaaacaaacagcgtaactcgttattgtttgcgatctacaatatctaaatgtactgggcaccattgcggtgcccaataagtttactcttccgtctttaaactttatttttgcgcgctttctttactgtcagctttcgtttctagttcatcgttatcgctgaaaataccatgaccactgttcaacaacatactaacgagcatatcattattaatctcttcaccatttaaaactcgcgccagaatttcgctgccaaacagttgcggactgagaatgatatccggatgtaccatcttaatcttattcaggtttttgctatcactgacggcgagaactgttttgacatcactgctcatatcttttgcgctgagtacaacaaacgcgttatctgcatcgttatcactcagcgccagaatggcccggcaacgatcgattcccgctttctttaatacagaactgtcattactgtcaccggggataacatcagcattatcgcctaagcgttgctcaagttgcttgatatcatcttcaggcaagttgctgataaccgttacgttttgtccgcgttgattcagttgcaggatcgtattgatggcgagaatgctatgtccgcaaacaataaaatgatctttacgatgcattgtatgattgtttccttttacaagtttgttgaatcccccgcggataagcggaccaaaaatactggtcatagatgtggcaaaaacggtaatgccggaaataatgacgctaatagtgaacaatcgtgcactttcagaaacagggacaatatcgccatagccgacggtactcatggtttctatgctaaaatagaacgcggtcatcaaactttctattcgcggattaaaaccttcgcttaaataaagcgcaccgtaggtactgtaaaacagtaatgtcgtgaaactaataaatgcaaaaattgtcccggctgcggcgctactgtgggagaagtctttgcgcagtatcagcaaaaacaccagcgtaaaaatgcaaaatccaatactaaatttcagccagggataaaaatgcagggtgtaaattagcgctatcaacaacaaaatgatactgattgcccatgcgagctttgcccggaacagtaagccaatggagttcaggacaagaaagacgccgagcataaagagtggggcgtttgccagcaaggagagatccaactcactaaatgctttgatatggaaaatatcaagcaaattgacgctcataccatagattgttttaaaaataagcaatccatttaaaaagacggccagcgcgagaatgtcgtgccgaagggtcacccataaatttgttgctgtttgtttgaatgtagcccagtgactcactgatacctctgtaaccacaattttgtttaattatcttagcgtgcacattttctgaacatacatgcagcgcgtgaatgtgttaaacaatagtagatgactttatccgcagtaatcaaaggatttgagcgagcaactgtacctcaggaaaggtcatttttcctgaatatgctcacatcatataaagaaatacagataaagttattatctgcttgtggtggtgaatgcactgaccggctataaggaaaggccaaacaagaacacggttgcaaaaaccgtgcccttaaatattgaatctctattcagaacactttcttaaatggtttcacactaacgtgttcatagactcctgccgctacgtacgggtcagcatcggcccaggcctgagctgcttccaggctttcaaattcagcaataacggtactgccagtaaatcccgcagcccctggatcgttactgtctaccgctggcattggaccagctgtcaacaaacgaccttcatcatgcagtaactgtaaacgtgctaaatgtgccggacgaacggaaaggcgtttttcgaggctatcagctttgtcttgagcgtaaataacatacaacacgggcacaactccttgttcgggaaagttgtaaagtacgttatttgaaagggcgaagatctgcaacggaaagatgatgtctttgttaaggccatgcataaagtaagggtaattacgccaaaaatgacattttcactgatcctgatcgtcttgccttattgaatatgattgctatttgcatttaaaatcgagacctggtttttctactgaaatgattatgacttcaatgacccttgatttacctcgccgcttcccctggccgacgttacttagcgtctgcattcatggtgctgttgtggcgggtctgctctataccagcgtacatcaggttattgaactacctgcgcctgcgcagccgatttctgtcacgatggttacgcctgctgatctcgaaccgccacaagccgttcagccgccaccggagccggtggtagagccagaaccggaacctgagccgatccccgaaccgccaaaagaagcaccggtggtcattgaaaagccgaagccgaaacctaagccaaaaccgaagccggtgaaaaaggtacaggagcagccaaaacgcgatgtcaaacccgtagagagccgtccggcaagtccgtttgaaaatacggcaccggcacgcctgacaagtagtacagcaacggctgcaaccagcaagccggttaccagtgtggctagtggaccacgcgcattaagccgtaatcagccgcagtatccggcacgagcacaggcattgcgcattgaagggcaggttaaagttaaatttgacgttacgccggatggtcgcgtggataacgtacaaatcctcagtgccaagcctgcgaacatgtttgagcgtgaggtgaaaaatgcgatgcgcagatggcgttatgagccgggtaagccaggcagtgggattgtggtgaatatcctgtttaaaattaacggcaccaccgaaattcagtaagcagaaagtcaaaagcctccgaccggaggcttttgactattactcaacaggtaaggcgcgaggttttccttcaggatcaaccgcgacatacttaaataatgcttctgtcgctttatagcgttgcccaattggttcagacgctacttttttcacccacacttcaatattaatgctgacgcttgtcgtccctttctggacacagcgtgcatagcagcacaccacatcgccgaccgcaaccggccgtaagaaagtcattccttcaacccgcacagtcactacgcgaccgtgggcaatttcttttgccagaatagcgccgccaatatccatttgactcattaaccaaccaccaaagatgtcaccattggcattggtatcggcgggcatggctaaagtacgtaaaacaagatcgccctgagggacgttatgtgttgtagacatggtaaaaccgacttaaaaggaaaatcacaggcgcgatgctactatgattttcctgaggagaacagaggagatacagcgccagccccgaaggactggcagtctggttaggatttatcttcctgcggcatgtggcggtagatatagataccgcttaacaatgtgaagattaaggtaagggcggtcaggccaaagactttaaagttgacccaaatattttgcggcagccagaatgcgatgtagatgtttgccagaccgcaaaggataaagaaaacagcccaggccagattcagcttgctccataccggttgcggcagcgtgagttctttacccagcatccgctgaattagcggctttttcatcacccattggctgactaacagggctcccgcaaatagagcataaatgacagtaaccttccatttaataaactcatcattgtggaagaacagcgtcaagccaccgaagacgaccaccagaacaaaagtgatcagggccatcttctcaaccttacgaaagcgaacccagctatagataagcacaatcgccgtggcgacgatcagcgccgcagtagccgcatagatgtcataaatcttgtaaaacgcgaaaaagacaaccagcggtaaaaaatcaagaaactgcttcattttacgattccgtaatcaaatgcttaaggttattggcgaatcaacatatacaggcggaacagatagatgagcaatatggcactaatcaggttgctcaaggtgttcgccagtacggcaccaatttccggggttaatgcggcaaaagaagaggcaaaaagcagcaacagtgtttttgccagcaaccagctcagtactgcgggtgccaccagacgcatattcgcccaagtcagccgcatactgctacgcatgctggcaaaaacgcccattttgtcctgtaccaacatcaccggtgccagggccagtaaaatggccatgataattcccggaacgaccaccagcatgatgccaatctgtactaaaagggtagtcagaaaaatcagaataaataactttggcaatatcggcgcactggcaccaatagctcgcagcgcactgactctctgacccgcagacaccagctggataattaatattacgcctccggcgagaatggcgttaccgattaatccactaaaagtggacgccgcactagcctgcagcaaaatttgttgctgttccggactcatattctgaaccaggtcgaacaacccactactgccgctaacgggcacgccgtcattgagctgcgcaagctgtgcatcactgggactgaaaacatgccctaacaccactgtgataaacgcacatagcaagcttaccaacagaatggtcataaattgattacggaagaaatttccggtgtcacggtatacggactgcgccgtgatagacatgcactctccttgagttttatgcaggtgttaattagcgggcaattgtaccctggttaagcctcgggtggcagcatcaggtcttgtatggaaaagcatatctttgtaaagcggaggtaattgctggccttcaggcatgggcaaatcgcggcaagtggcgaccgagttaatatttgcgtagcgaaaatatttaaaaattgatttaaatcacattaaccaggattctcaatgcaacttctaaattaatccagatcaataaagggtgaattatcatatgtaatgtgatctatgtaggatcatttgttactccaatgtaggtatattcgtcacgtttttataaccataacgacggagcggatatgaaaaagttaacagtggcggctttggcagtaacaactcttctctctggcagtgcctttgcgcatgaagcaggcgaattttttatgcgtgcaggttctgcaaccgtacgtccaacagaaggtgctggtggtacgttaggaagtctgggtggattcagcgtgaccaataacacgcaactgggccttacgtttacttatatggcgaccgacaacattggtgtggaattactggcagcgacgccgttccgccataaaatcggcacccgggcgaccggcgatattgcaaccgttcatcatctgccaccaacactgatggcgcagtggtattttggtgatgccagcagcaaattccgtccttacgttggggcaggtattaactacaccaccttctttgataatggatttaacgatcatggcaaagaggcagggctttccgatctcagtctgaaagattcctggggagctgccgggcaggtgggggttgattatctgattaaccgtgactggttggttaacatgagtgtgtggtacatggatatcgataccaccgccaattataagctgggcggtgcacagcaacacgatagcgtacgcctcgatccgtgggtgtttatgttcagtgcaggatatcgtttttaattccgcacaaaaacgaccccgtaatatacggggtcaataaggacatggtataaagggtattatttcttcgcttctacgccatcagtttcagagcgaattaaaaatttctcagttgtttgcggaatattctgaatcagccagtcggccatttgcttttcctcatttaaaatcgcttcgatggttggaatactagctgtatcaccggcattttttgctgctgctaatagactggtgtaacaggcgatttcaaattgctcgaagacatatccgctaatagagcctttgactatttcatcagaagggaatataccaccgatactctgcccaagcgcagccattttactcatggaatctttaatgacactacgactaatgtcattacgatcaagaatagtttccagttgaacaatctggtttttggtttcactaagatgttgttcaatacgagcgcgtagttcaggataattatctatacggctggccatggattcaagcatagattcggcttgcttttccattgcgtgggcgtcacgtaaccagtcatgataatgttcaatacgattcatgaaaatgtcctctttataaaatgactaaaagttaaaattcatatttcaggctttattttcggctttcttatttacgttattaatggccagatcagtcagtttgatgtcggtggccttttcttcttccagggtttctttcagaagcttcgctgctttacggtaacctaattgttcagccagcgtcgctaatgtcccgtaactggcaatctcataatgctcgactttctgtgctgcggcaatcagtgcggcatcacgcacttcgtttttctcggtactttcgatgacctcattagcttcttcaataagaccttccattgccacacatttcatgcgcttaattttcaggttgctttcggactccacaacttgatcaatacgttcaatctgtccatgagtttcctcgaggtgcgcatgaaaagcctgacttaatttttcattacttgttgctcttgcgagttttgccagtgcccgggttaattgtttttctgcgctgtaggtatcactaagcaggtgaataaatacatcttcaatggtcttcatattcatatttttctccagtgaaatcactgcgagccatacggcccgcagatgcaattatctttatcagctgatattaataattaacggtgaatcaggatttgccacttttattaccaccgctttgttgaccgccttttttacccgcttcagatgcgcgttgcggatcatttttaaaattaccgccgctatgctgaccgcctttacggcctgcgtcggatgccttctcacggtcttcggcgaaatttccactaccaccacgatgttcggccatgttatttctcccgttgcgttgcattgtttcattaatatgagtgttgtgtgtcgacactcattaaaattagtcgctaatgagaattagtcaaattaagcgcaacgagaagatagagggaaaatatattttgaggaacattctggatatattaacaattacctgaggaataagtgacttagagaaaattattgattttactggtgttatgttgcgggattaatttgtttgattatattactgttgggcggaaaaatgacgtaagttgacgttcgaccggggtaagcgaaacggtaaaaagataaatattaaatgaatttaggatttttccggcttcattaaagaaagttaaaatgccgccagcggaactggcggctgtgggattaactgcgcgtcgccgctttcatcggttgtacaaaaactttcagtgccgccagcattttctctggctcattaatatgttgctcgatgattttaacaatggcgctaccagaaatcgcgcccgcagctcctgcatcaatcgctgcttttacctgatccggggcggaaataccaaatccctgcaatggaggtgcagcgttgtactctttcagcttcgcaaccagatgattgaggggtaacgcggcgcggttttctgcgccggtcacgcctgctcgactcagcaaataggtgtaaccacgaccgtaagaggctatctggcgcagcaggtcgtcatcggcatttggcgggcagatgaagataggtgcgacattatgacgcaacgcggcctggcggaagggcgcggactcttcaactggcacatcggcaaccagcacgctatcgacgccgactttttcgcactgggcataaaactcatcaatgcctttgttaaacaccagattggcatacatcaacaggccaatgggaatggtcgggtgtttctggcgaatcagtgccagcatttcaaaacattgtgccggagtcacacctgccgcaaaggcgcgcagagtggcgttttgaatcgtcgggccatccgccagtgggtcggagaaggggatacctaactccagcgcgtcagcaccggcttcaattagcgtatcgataattttcaaactctgctcaatgcccggatcaccgagcgtgacgaaaggaacgaatgcgccttctttgcgctccttcaactgggcaaacagagattcgtagcgttccatcagatttcccctcgtgctttcaaaatatcgtgaacggtgaagatgtctttatcgccgcgaccggaaaggttaaccaccagtagctgctctttatccgggttttcgcgcatcattttcaacgcatgggccagggcgtgggaggattccagcgccgggatgatcccttcgtgcaggcacagcgttttgaaggcttcaagggcttcatcatcggtaatagacacgtaatcagcgcgtccagtgctgttaagatacgcgtgttgtgggccgacagacgggaaatccagtccggcggagatggagtaagattcttcaatctgcccgtcttcggtttgcatcatcggcgctttcataccgaaatagatacccacgcgaccatgttttagcggtgcgccgtgctcgccagtttcgataccgtgaccacctggctccacaccaatcaggccgacgttggtttcattgatgaaatcagcaaacatgccgatggcattgctaccgccgccaacacaggcgataacggcatccggcaggcgaccttctctttccagaatctgcgctttggtttcttcgccaatcatccgctgaaactcacgcacaatggtcggataaggatgcgggccagctgcggtgcccagcatatagtgcgcggtttcgtaactaccggaccagtcgcgcagcgcctcgttacaggcatctttcagcgtcgcggaaccgctatgcaccgggatcacttccgcacccattaagcgcatacgaaaaacgttagggctctggcgttcaacgtctttggcacccatataaatacggcatttcaggccgagcagggcgctggcaagggcgctcgccacgccatgctgaccggcaccggtttcggcgatgatttcggttttacccatccgcttcgccagcaacgcctgccccagcacctggttagttttatgcgcgccgccgtgcagcaaatcttcacgcttgagatacagcgtggtgttcgtcccggctgtaatgttctggcatttggtcagcgcggttggacgcccggcatagtttttcagcaggtcgttgaactgagcctgaaattcaggatctttttgcgcactgacaaaagcttcttccagctggcgcagagcaggcatcaggatttgtggcacgtacatgccgccaaactcaccaaaataggggttaagtaatgttgtcattgttcctttccttaatatgcgcgcagcgtctggaaaacgctggccaaaagacgtgcgtctttgatgcccggttggctctctacagcagaattaaaatcaagtccggcgcagccggtttgtgccgcttccacgcagttatctgcgcctaagccccccgccagcagaacgttgccaaggctttgaccatttaatagactccagtcaaaacgttgcccgcttccaccctggccgttgtctaaaacatatttatcaacgtgctgaaactcgcgggcgggcagggtttcaccgacgcttaatgctttccagatggcaacatgtgctggcagagcttcacgcagcgtatcgatatacagctgttcttcattaccatgcagttgcactgccgccaggcttaacaccttagctttgtccaccacatcggcaatatcgtgattgcggaacacgccaacatactgcaacggtgccgcagccatcacttcctgcgcctgttcaacgttgacgcaacgcggacttgtcgcaacaaaaatcaacccaccgtaaatcgcgcccgcgtcataagctgctttagcatcttgcccacgcgtcaggccacatactttattctcacccagcaacacccggcgcacggcggcgtgcaaatcgtcatgggccatcaacgcgctaccaatcagaaaaccgttagcgaagtggcttaactcgcgcacctgagcgtaagtattgatgccggattcgctgattaccgtcacgttgtgccccagtttcggcgcaagctcgcgggtacggttgagatcaatgctcaaatcacgcagatcgcggttgttgatgccaacgacctttgctcccaatgcaatggcgcgctcctgttcctcttcattactgacttcggtcagcacccccatctccagactgtgagcgacggcggcaagctggcgatattggtcgtcatccagtacactaagcattaataagcaggcatcggcctggtaatagcgcgccagatagatctggtaagggtcgataatgaagtctttacataaaatcggctgcggggcgatttggctgacgatggggaggaaattaaagctcccctgaaaatatttctcatcagtcagcacgctaattgcgctagcgtaatgtttataaatggcggcaatgcgtgctggatcgaaatcatcacggatcacgcctttactcgggctcgctttcttgcactccagaataaacgccgtgcgcgcaccctgtagcgcatcataaaaatgtcgcgtgctcggctgaacctcattctgaaaactggccagcggttgctgctgtttgcgggcttctacccaaatcgccttgtctgcgacgattttcgctaaaacggtttgcatcatttaccctcgtgccgccagtgcggtgactctgtcgtaagcggaaccactgcgcagtacctcaagaacggtttgcgcattggcttgcagatcttcatggccatgcaggcgcattaacatggcgacgttcgcagcgacggctgcttcatgggcggcgtcgcctttaccttgtaacaaacgtgttaaaatgtcacggttttcttccggtgttccgcctgccagttgctcctggtggtagggtgtcaggccaaagtcttctgcggtgagctgatagcttttaatttcgccgtcatgcagttcggcaacgattgtcggcgcgtgtaaactaacttcatccatcccgccgctgtgcaccaccgccgcgcgttgataccccagcacgcgcaaggtttcggcaatcggcagcaccagttccggactataaacaccaattaacgccagcggcggatgcgccgggttaatcaatggccccagcacattgaacagggtgcgggttttcagttgctggcgaaccggcatcgcgtggcggaatccggtgtgatacttcggcgcaaagaggaaacatacacctaactcatccagcgcctggcggcttttatcggcgttcatatcaagattaataccgaacgccgccagcagatcggagctaccagatttactggagacgctacggttgccgtgtttcgccactttcagcccacaggccgcggcgacaaacgcactggcggtagaaatattgatactgttgctgccgtcaccgccagtaccgacgatatcagcaaacagataatccgggcgcgggaacggcgctgcgttttccagtagcgcggttgctgccccggcgatctcgttcgggtgctcaccgcgaattttcatgctcaccagcgccgccgccagttgttccggcttcagctcgccacgcaccaccgcactaaacagctggtggctttcttgttggctaagcgtctgcgcctgatacagtttttccagaatcggttgcagcgtgttggctggctctagtttctgctgcgcccaggccagcgtttgttccagcaggcgagcgccctgggtggtgagaatggattccggatggaactggaatccacaaacgcgatccgcatcgtgacgtactgccatcaccatgccattaaaatgggcgttgatggttaaaccggccggaatgttactgccaaccaggctgtgataacgcgccaccggcagcgggtttgttaatccggcaaacatcgcctgaccgtcatgttcaatgctggaggctttaccgtggagaatttcgcccgcctgaccgacatagcccccgtaagcttcgacaatcgcctgatgtccgaggcaaatgccaataatgggcagcttgccacgcaagcgggtgaggagttccggcatacaaccggcttcgctcggcacaccggggccaggagaaagcatcagcaccggattgctcatggtcgccaggcgttcaattaaggtttgcgccggaatatggttgcggtaaatcaccacgttatgcccattgctgcgcaactgatctgccaggttgtacgtaaaagagtcgatattatcgagcagcagaatgtcagccatcagaaagtctcctgtgcatgatgcgcggtggcaatagcgcgcagtacagcgcgggctttgttacgggtttcgtcggcttcgctctgcggaacagaatcaaggactacaccagcacccgcttgcacggtggcgataccgttttccaccagcgcgctgcggatcacaatgcaggtgtcgagatcgccatgcgcggtgaaataacctaccgcgccgccgtagctgccgcggcgacgaccttccgcctcggcaattaactgcatagcgcgtactttcggcgcaccgcttaacgtccccatattcatacaggcgcgataagcgtgcagggcgtcaagatcgtgacgcagttcgccgactacgcgagagacgaggtgcatcacataggaataacggtcaactttggtgagatcggcgacgtagcggctgccgggggtgcaaatgcgtgccagatcattacgggcgagatcaaccagcatcagatgttcagacagctctttatgatcggtacgcatttccagttcaatacggctgtcgagatctctgtccagactaccatcggcgcgacgaccgcgtgggcgtgttccggcaatcgggtagatctcaatctggcggctggtggcatcatacttgaggctgctttccgggctcgcgccaaatagggtgaaatcattatcctgcataaaaaacatgtacgggctgggattactctttttcagcacgtaataggccgccagcggactcgggcagggcagagagaaacggcgagatggcaccacctggaaaatttctccagcgcgaatcgctttttgcaacaaacgcactacgccaccgaactcttcatcgctctgattacattcacaacgcatatgcggcacggaaaccactggcagcggcggcgcggcttcggtcagttgctgacgtagttcgttcaggcgagcagtgagacgttgtttttcttcttcattcggagcaaacaggctggcctgaatacgggtgctttttttctgatggtcaatcaccatcagcgtttcagcgagataaaaacagaaatcagggcagttattttccgcactcagttgcggtaaatcttcaaatcccgccacaaggtcataagagaacaggccgccgaagaacatggcttctcgttcttccttcggtacattcaacagattctgcaataaacggaaagcgtcaaaaacgctaagggagcataagcgggcgtcttcatccagcagtggactgacaggggggaagcgcagcacacggcagtttggactttgttcactttccacacccgcaggcagggcgttatccagtagtgccaggagggcttcgccgttgccggaaagtgcctggattgtgacagtgtcacctaaagctgtaatgcgcagcgcactgtctaccagcagcaggctttttaaatcatctttgctgtcgatatctgcggattccagcagcagcgttgccggacgatccccacacaactggtgaaaaagcgcggtgggattgtcgcgataagcgccttcgcaggttagcagttcgagagtcggtttttgtgtttgcattgttattctctaattttgttcaaaaaaaagcccgctcattaggcgggctgggtatctgattgctttacgcatggtgaatacactgcccgtttcaggaagtgcgccaccaacctttcagtacgaaaattgctttcattgtcgataccctttttacgtgaacttgcgtactagttaactagttcgatgattaattgtcaacagctcatttcagaatatttgccagaaccgttatgatgtcggcgcaaaaaacattatccagaacgggagtgcgccttgagcgacacgaattatgcagtgatttacgacctgcacagccataccacagcttccgatggctgcctgacgccagaagcattggtgcaccgtgcagtcgagatgcgcgtcggcaccctggcgatcaccgaccatgacaccacagctgcaatcgcgccagcaagagaggaaattagtcgtagcggactggcgttgaatcttattcccggcgtggaaatttccacggtctgggaaaatcatgaaattcatattgtcgggctgaatattgatattactcatccgctaatgtgtgagttcctcgcgcagcagacagaacggcgcaatcagcgggcgcagctgattgccgaaagacttgaaaaagcgcaaatacctggggcgctggaaggcgcacaacgactggcgcagggcggcgcagtgacgcgcggtcattttgcgcgtttccttgttgagtgcggcaaagccagtagtatggcggatgtctttaaaaagtatctggcgcgcgggaaaaccggatacgttccgccacagtggtgtacaatagaacaagctattgatgtcattcatcattctggcggtaaggcggtgctagctcatcctgggcggtacaatcttagtgctaaatggctgaaaagattggttgcgcattttgccgaacaccacggtgacgcgatggaagtcgcgcagtgccagcaaagccccaatgaacgtacccagctggcggcccttgcgcgtcagcatcatttatgggcaagtcaaggatctgattttcatcagccatgcccgtggatcgaactgggtcgtaaactctggctgcccgcaggcgttgaaggcgtctggcagctatgggaacagccgcagaacaccacagagagggaattatgagccagtttttttatattcatcctgataacccacagcaacgtctgatcaaccaggcggtggagatcgtgcgtaaaggcggggtgattgtttatccaactgattccggctatgcgctcggctgtaaaattgaagataaaaacgcgatggagcgtatttgtcgtattcgccagctgccggacggtcacaactttaccctgatgtgtcgcgatctttctgaactcagcacctatagttttgttgataacgttgcgtttcgtttaatgaaaaacaacacgccgggcaactataccttcatcctgaaggggacgaaggaagtgccacgccgtctgttgcaggaaaaacgcaaaaccatcggtatgcgtgtgccttctaaccctatcgctcaggcgttacttgaagcattgggcgaaccgatgctttccactagcctaatgctgccaggcagcgaatttaccgaaagcgacccggaagaaattaaagatcgtctggaaaaacaggtagatttgattattcacggcggctatctcgggcagaaaccgacaacggttattgatcttaccgatgatacgccggtcgtggtgcgtgaaggcgtaggtgatgtgaagcctttcttataacaaattgcgttccacggatggaagactatggcagggaagtttcgctgcattttgctgttgatagcagggctgtttgtaagttctctaagttatgcagaaaacacggagatcccttcttatgaagaagggatcagcctctttgatgttgaagccactctgcaaccagatggggtgctcgacatcaaagaaaatattcattttcaggcgcgaaatcagcagattaagcacggcttttatcgtgatttaccacgactatggatgcagcctgatggggacgctgcactgctgaactatcatattgttggcgtcacccgtgatggtattcctgaaccctggcatcttgactggcatatcgggttaatgagtattgtcgtgggcgataaacaacgtttcttgcctcaaggcgactatcattatcaaattcattatcaggttaaaaatgctttcctgcgtgagggggattctgatctgctaatctggaacgtgaccggtaaccactggccgtttgaaatttataagacccgtttttctctccagttctctaatattgcgggtaatccatttagcgaaatcgatctttttaccggagaagagggcgacacatatcgtaatggccgcatccttgaggacggaagaattgaatcccgcgatccgttttatcgtgaagatttcacggtcctctaccgctggcctcacgctttacttagcaatgccagcgctccgcaaacgacgaatattttcagccatcttcttttaccctccacgagtagcttgttaatttggtttccgtgtctgttcctggtttgtggatggttatatctctggaagcgcaggccgcaatttacgccggtagatgtgattgaaaccgatgtcattccgccagattacacgcccggcatgttacgtctcgatgcgaagctagtttacgacgataaaggtttttgtgccgatatcgtaaatctgattgtgaaaggaaaaattcatctggaagatcagtctgacaagaaccagcaaatcctgattcgtgttaatgaaggcgcgaccagaaataatgcggtattactgcccgcagagcagttattactggaagcgttatttcgtaaaggcgataaggtcgttcttacggggagacgcaacagagtcttacgcagggcatttttacggatgcagaaattttatctgccgcgtaaaaagtctagcttttaccggtctgatacttttttgcaatggggtggactggcaatattggcggtcattctttacggtaacttgagtcctgtaggctgggcaggaatgagtctggtgggcgatatgtttattatgatctgctggattattccttttttattttgttcccttgagcttttgtttgcccgcgatgatgacaagccttgcgttaatcgtgtaatcatcactttgtttttaccactgatttgtagtggcgtggccttctattctctctacatcaatgtcggagatgtattcttttactggtatatgccagcgggttattttaccgctgtttgcctgaccggttatctcactggcatggggtatatttttctgccaaagtttacccaaactggacagcaacgttatgcccacggtgaagctatcgttaactatcttgcgcgtaaagaggcagcaacacacagtggacgtcggcggaaaggggaaacacggaaactggattacgcgttgctaggttgggctataagcgcaaatttggggagggaatgggcgttacgcattgcccctagcctttctagcgcgattcgcgctccagagattgcccgtaacggcgttttattcagtttacagacgcacctaagttgcggggccaataccagtttgttggggcgaagttattccggtggtggtgctggcggcggcgcgggtggcggaggcggtggtggctggtaattaagctgatgttaatcgaaacaagctttaaccataaagatagtgtagtatgttgcgcctcaaagccaggccgataaacgtcgagtcgtttacttaaggcctgaagagttcaaacagactttactatcagtgagtcagatgtaagttctgactcactgttgcacaaaagcatatcagacgcctgggaaggcgacaccaaaaggaagctctatgagcgaaaagctacagaaagtgctggcgcgtgccggccacggttctcgccgtgaaatcgaatctattattgaagccggtcgtgtgagtgttgatggcaaaattgctaaactcggcgatcgtgttgaagttacccctggattgaaaatccgtatcgatggtcacctgattagcgtacgtgagtccgctgaacaaatttgtcgcgttctggcctattacaaaccggaaggtgagttgtgtacccgtaacgatccggaaggacgtccaacggtgtttgaccgtctgccaaaactgcgtggcgcacgctggattgccgtgggtcgcttggacgttaatacctgtggtctgctgctgttcaccaccgatggtgaactggcaaaccgtttaatgcacccaagccgtgaagttgaacgtgaatatgccgtgcgtgtatttggtcaggttgacgacgcgaaactgcgtgatttgagtcgtggcgtgcagttggaagatggtccggcagcttttaaaaccatcaagttcagcggcggcgaagggatcaaccagtggtacaacgtgactctgaccgaaggccgtaaccgtgaagttcgtcgtctgtgggaagcggttggtgtgcaggtgagccgcctgatccgtgttcgttacggtgatatcccactgccaaaaggtctgccacgcggtggctggacggagctggacctcgcccagactaactatctgcgcgaactggtggagctaccgccagaaaccagctctaaagtcgctgtagaaaaagaccgtcgtcgcatgaaggcgaatcagattcgtcgtgcggtgaaacgtcacagtcaggtgagcggcggtcgtcgttctggcggacgtaataataacggttaatcaaagtatgccggacgtcatatccggcatttttacagattaataatcgatccctatctgcgcttttacaccggcatcaaacgcatgtttgacggggcgtaattcacttaccgtatctgccagttcaagaatatcccgatgacaaccacgacccgtgataatcaccgtctgttgatgtggacgttcatttaacgcctgcaccacttcttccagtggcaaatagtcatacgccaccatatacgtcagttcatcaagcaaaaccatatccagactggaatcagcaagcatccgctttgcatgttgccagacttcgcggcaggcggcggtatcagactcgcggttttgtgtatcccaggtaaagcccgttgccatcacctgaaactcaacgccatgtggctccagcagattgcgttcgccattaggccaggtgcctttaataaactgcacgacgcctactttttttccgtgaccaactgcgcgtgttgccgtaccaaatgccgcggtggttttgccttttccattgccggtaaagacgatgataataccgcgttcatcctgggcctgggccacacgagcatctactttttctttcactcgctgctgacgctgttggtagcgttcatcactcattgggaaattcctggtttacggcccggttgggcgtcaaaggtcatgccggttttacggcggctgtcatcgcccatcagccagaggtagagcggcatgatatcagcgggtgttttaagtttctgtggatcttcggtcgggaaggcgctggcacgcattgcggtgcgcgtaccgcctgggttaatgcagttgacacgcaggcgctgctgatattcatcggccagtacctgcatcatcccttcggtggcaaatttgctcgctgcatatgcaccccagttggctcgtccctgacgtccaacgctactactagtaaagaccagactaccggcgtcgcttttgagtaataaaggaagcagtgcctgggtgagcataaaggtggcattaacgttgacctgcatgacgtcctgccagacctgcggattttgttcgctcattgggcaaacatcgccgagcaatccggcattatgcaaaacaccatccagacgcggataattaacggcaatgcgctgtgccagttgttggcaattttcggacgtgcaggtcagcaaatcgagaataaaccactgtggctgacgcccagtttcttcgtttatgtggctggctacctgacgtaatttttcttcattacggcccaacagaatcactgtcgcaccatagcgtgcatacgtcatcgcggcttcacgaccaataccatcgctggctcccgtcaccaggataatgcgatcattgagtaaatcttgttttggctggtaatgcatggctactcctcaacgacgttgtctgtcgcgctgccagtgtactttatgactttggggctttatgcctgaaacagaagggcatttcaatcagcctggggcgataacaccgcaaaatggatactttgtcatactttcgctgcaataacatctctgcgagacggcttaacatgcctgttgtaaactgtgagccaaagcgttgtttaaccaaggtggggactcgtggaattgttgtctgaatatggtttgtttttggcgaaaatcgttaccgttgtgctagcgattgcggcgattgccgccattattgtcaatgttgctcaacgtaataaacgccagcgtggcgagttacgggtcaacaatctcagcgaacagtataaggagatgaaagaagaactggccgcggcgctgatggacagtcatcagcaaaaacagtggcacaaagcgcagaagaaaaagcataagcaagaagcgaaagcagcaaaagcgaaagccaaactgggcgaggtggcaactgacagtaaaccccgcgtctgggtgctggattttaaaggcagcatggacgcccatgaagtgaacagcctacgtgaagagataacggctgtactcgcagcattcaaaccgcaggatcaggttgtgctccgtctggaaagccctggtggcatggtgcatggttacgggctggcggctagccaactgcagcgtctgcgcgataaaaacattcctttaactgttacggtagacaaagtcgctgccagcggcggttacatgatggcctgtgtggcggacaaaattgtttccgcaccgtttgctattgtgggttccattggcgtggtggcgcaaatgcccaactttaaccgcttcctgaaaagcaaagatattgatatcgaactgcacactgccgggcagtataagcgcacgctgacgttgctgggtgaaaataccgaagaagggcgggagaaattccgcgaagagttgaacgaaacgcatcagttgtttaaagattttgtgaagcgtatgcgtccttctctggatattgaacaggtggcaacgggtgaacactggtacggacaacaggcggtagagaaaggcctggttgatgaaatcaacaccagtgatgaagttattcttagcctgatggaaggccgtgaagtggtcaatgtacgctatatgcagcgtaaacgactcattgaccgattcaccggcagcgcggcagagagcgccgatcgattgttgctacgctggtggcagcggggtcaaaagccattgatgtaaaagacaaacgcgaggctaagacctcgcgttttgctttaatcaaccagatgatatttttcactaagcacatgggccaggtgtttgaacatattaaacaccgcggtgcttttggctgttggcaatccttgttcatctaaaaagtagtcgccggtaaataccagcacgccattacgctgcgtgacgccggtggcttcaatccctgcgagcgtatcctcatgctcacgaatgattttgttggcctctttcaacagcgtttcgcggtcgatgggttgtgtctctttgttcattatttactccttaaacaaggacattagtctacgccaggcatggcttgcagacaaatataccacgctggtggcaagagcgccttactggcaactttggattttgcatgctaataaagttgcgtatcggattttatcaggtacagtgtgacgctttcgtcaatctggcaatagatttgcttgacattcgaccaaaattccgtcgtgctatagcgcctgtaggccaagacctgttaactcagtcacctgaattttcgtgaacagagtcacgacaaggggttgatatccgcagagagcgagtccatatcggtaactcgttgccagtggaaggtttatcaacgtgcgacgcattcctggaagaatcaaattaggtaaggtgaatatgggtaaagctcttgtcatcgttgagtccccggcaaaagccaaaacgatcaacaagtatctgggtagtgactacgtggtgaaatccagcgtcggtcacatccgcgatttgccgaccagtggcagtgctgccaaaaagagtgccgactctacctccaccaagacggctaaaaagcctaaaaaggatgaacgtggcgctctcgtcaaccgtatgggggttgacccgtggcacaattgggaggcgcactatgaagtgttgcctggtaaagagaaggtcgtctctgaactgaaacaactggctgaaaaagccgaccacatctatctcgcaaccgaccttgaccgcgaaggggaagccattgcatggcacctgcgggaagtgattgggggtgatgatgcgcgctatagccgagtggtgtttaacgaaattactaaaaacgcgatccgccaggcatttaacaaaccgggtgagctgaatattgatcgtgttaatgcccagcaggcgcgtcgctttatggaccgcgtggtggggtatatggttagcccgctgctatggaaaaagatcgctcgtggcctgtctgccggtcgtgtgcagagcgtggcggttcgcctggtggtcgagcgtgagcgtgaaattaaagcgttcgtgccggaagagttctgggaagtcgatgccagcacgaccacgccatctggtgaagcgttggcgttacaggtgactcatcagaacgacaaaccgttccgtccggtcaacaaagaacaaactcaggctgcggtaagtctgctggaaaaagcgcgctacagcgtgctggaacgtgaagacaaaccgacaaccagtaaacctggcgctccttttattacctctacgctgcaacaagctgccagcacccgtcttggatttggcgtgaaaaaaaccatgatgatggcgcagcgtttgtatgaagcaggctatatcacttacatgcgtaccgactccactaacctgagtcaggacgcggtaaatatggttcgcggttatatcagcgataattttggtaagaaatatctgccggaaagtccgaatcagtacgccagcaaagaaaacagtcaggaagcgcacgaagcgattcgtccttctgacgtcaatgtgatggcggaaagcctgaaggatatggaagcagatgcgcagaaactgtaccagttaatctggcgtcagttcgttgcctgccagatgaccccagcgaaatatgactccacgacgctgaccgttggtgcgggcgatttccgcctgaaagcacgcggtcgtattttgcgttttgatggctggacaaaagtgatgcctgcgttgcgtaaaggcgatgaagatcgcatcttaccagcagttaataaaggcgatgctctgacgctcgttgaacttacaccagcccagcactttaccaagccgccagcccgtttcagtgaagcaagcctggttaaagagctggaaaaacgcggtatcggtcgtccgtctacctatgcgagcatcattagcaccattcaggatcgtggctacgtgcgagtagaaaatcgtcgtttctatgcggaaaaaatgggcgaaatcgtcaccgatcgccttgaagaaaatttccgcgagttaatgaactacgactttaccgcgcagatggaaaacagcctcgaccaggtggcaaatcacgaagcagagtggaaagctgtactggatcacttcttcagcgatttcacccagcagttagataaagctgaaaaagatccggaagagggtggtatgcgcccgaaccagatggttctgaccagcattgactgcccgacttgtggtcgcaaaatggggattcgcacagcgagcaccggggtattccttggctgttctggctatgcgctgccgccgaaagagcgttgcaaaaccaccattaacctggtgccggaaaacgaagtgctgaacgtgctggaaggcgaagatgctgaaaccaacgcgctgcgcgcaaaacgtcgttgcccgaaatgcggcacggcgatggacagctatctcatcgatccgaaacgtaagttgcatgtctgtggtaataacccaacctgcgacggttacgagatcgaagagggcgaattccgcattaaaggttatgacggcccgatcgttgagtgtgaaaaatgtggctctgaaatgcacctgaaaatggggcgtttcggtaaatacatggcctgcaccaacgaagagtgtaaaaacacacgtaagattttacgtaacggcgaagtggcaccaccgaaagaagatccggtgccattacctgagctgccgtgcgaaaaaagtgatgcttatttcgtgctgcgtgacggtgctgccggtgtgttcctggctgccaacactttcccgaaaagccgtgaaacgcgtgcgccactggtggaagagctttatcgcttccgcgaccgtctgccggaaaaactgcgttatctggccgatgcgccacagcaggatccggaaggtaataagaccatggttcgctttagccgtaaaaccaaacagcaatatgtctctagcgaaaaagacggaaaggcgactggctggagtgcattttatgttgatggcaaatgggttgaaggaaaaaaataacctttaattctgtcaggtttttataaacaaagggtcgcgaaagcggcccttttttattgcatattattttttcttcacacctatacactaaggctataaatgatatagtggttatagttagcaccttttttattattaaatcgtattagtcacccgccaggtgtgacgaaaaaacgatgttctgatggcgtctaagtggatggtttaacatgaaattacaacaacttcgctatattgttgaggtggtcaatcataacctgaatgtcagtagtacagcggaaggactttacacaagtcaacccgggatcagtaaacaagtcagaatgctggaagacgagctaggcattcaaattttttcccgaagcggcaagcacctgacgcaggtaacgccagcagggcaagaaataattcgtatcgctcgcgaagtcctgagcaaagtcgatgccataaaaagcgttgccggagagcacacctggccggataaaggtagtctgtatatcgccaccacgcatacccaggcacgctacgcattaccaaacgtcatcaaaggctttattgagcgttatcctcgcgtttctttgcatatgcaccagggcagcccgacacaaattgctgatgccgtctctaaaggcaatgctgatttcgctatcgccacagaagcgctgcatctgtatgaagatttagtgatgttaccgtgctaccactggaatcgggctattgtagtcactccggatcacccgctggcaggcaaaaaagccattaccattgaagaactggcgcaatatccgttggtgacatataccttcggctttaccggacgtagtgaactggatactgcctttaatcgcgcagggttaacgccgcgtatcgttttcacggcaacggatgctgacgtcattaaaacttacgtccggttagggctgggggtaggggtcattgccagcatggcggtggatccggtcgccgatcccgaccttgtgcgtgttgatgctcacgatatcttcagccacagtacaaccaaaattggttttcgccgtagtactttcttgcgcagttatatgtatgatttcattcagcgttttgcaccgcatttaacgcgtgatgtcgttgatgcggctgtcgcattgcgctctaatgaagaaattgaggtcatgtttaaagatataaaactgccggaaaaataatttcttgcgttattttcggcaccttttatgtagcgaaggtgccggaatatattctcttttgttacttatttctataccgtgcacaatatttttatccctcatatttatagggtaaattacctgtaaagtagtgtctaattacccgcctcgcaaactccagttttcaaatatctatttcaggtcaaaagattgaattattcactggagacgattcgtaaattcgctggatttttgactaaagtttctttaggatttgtctcatcgtatgattaattacaccaatcgttcaacgtcttgctgataagtgatggcgattatatgaggttagcaatgccttctggaaatcaggaaccccgccgcgatcctgaattaaaacgtaaagcctggctggcggtttttcttggttctgcacttttctgggtggttgtcgcactgctgatttggaaagtgtggggataactatggtcggtcaggagcaactggagtcgtcaccattatgccagcatagtgacaatgaaacagaaacgaaacgggaatgttccgtcgttattccagacgactggcaactaacatcgcagcagcaagcctttatagaactgtttgctgaagatgatcagccgaaacaataattatcatcattcttattacccatttttaatgaattaaagggcttttaatacaccgcagcaataacagcttgagttatctcaacacaaaataataaccgttaagggtgtagcctatgatcaacacaaatatgaaatattggtcctggatgggcgcgttttctctgtcgatgctcttctgggccgaactcctctggatcattactcactgatccttgaccccgctgcggcggggttgtcatttgctttgccacaaggtttctcctcttttatcaatttgggttgttatcaaatcgttacgcgatgtttgtgttatctttaatattcaccctgaagagaatcagggcttcgcaaccctgtcattaaggaggagctatgagcagtaccctacgagaagccagtaaggacacgttgcaggccaaagataaaacttaccactactacagcctgccgcttgctgctaaaagtctgggcgatatcacccgtctacccaagagtctcaaagttttgctcgaaaacctgctgcgctggcaggatggtaacagcgttaccgaagaggatatccacgcgctggcaggatggctgaaaaatgcccatgctgaccgtgaaattgcctaccgcccggcaagggtgctgatgcaggactttaccggcgtacctgccgttgttgatctggcggcaatgcgcgaagcggttaaacgcctcggcggcgatactgcaaaggttaacccgctcagtccggtcgacctggtcattgaccacagcgtgaccgtcgatcgttttggtgatgatgaggcatttgaagaaaacgtacgcctggaaatggagcgcaaccacgaacgttatgtgttcctgaaatggggaaagcaagcgttcagtcggtttagcgtcgtgccgccaggcacaggcatttgccatcaggttaacctcgaatatctcggcaaagcagtgtggagtgaattgcaggacggtgaatggattgcttatccggatacactcgttggtactgacagccacaccaccatgatcaacggccttggcgtgctggggtggggcgttggtgggatcgaagcagaagccgcaatgttaggccagccggtttccatgcttatcccggatgtagtgggcttcaaacttaccggaaaattacgtgaaggtattaccgccacagacctggttctcactgttacccaaatgctgcgcaaacatggcgtggtggggaaattcgtcgaattttatggtgatggtctggatagtctaccgttggcggatcgcgccaccattgccaatatgagcccagaatatggtgccacctgtggcttcttcccaatcgatgctgtaaccctcgattacatgcgtttaagcgggcgcagcgaagatcaggtcgagttggtcgaaaaatatgccaaagcgcagggcatgtggcgtaacccgggcgatgaaccaatttttaccagtacgttagaactggatatgaatgacgttgaagcgagcctggcagggcctaaacgcccacaggatcgcgttgcactgcccgatgtaccaaaagcatttgccgccagtaacgaactggaagtgaatgccacgcataaagatcgccagccggtcgattatgttatgaacggacatcagtatcagttacctgatggcgctgtggtcattgctgcgataaccagctgcaccaacacctctaacccaagtgtgctgatggccgcaggcttgctggcgaaaaaagccgtaactctgggcctcaagcggcaaccatgggtcaaagcgagcctggcaccgggtagcaaagtcgtttctgattatctggcaaaagcgaaactgacaccgtatctcgacgaactggggtttaaccttgtgggatacggttgtaccacctgtattggtaactctgggccgctgcccgatcctatcgaaacggcaatcaaaaaaagcgatttaaccgtcggtgcggtgctgtccggcaaccgtaactttgaaggccgtatccatccgctggttaaaactaactggctggccagcccgccgctggtggttgcctatgcgctggcgggaaatatgaatatcaacctggcttctgagcctatcggccatgatcgcaaaggcgatccggtttatctgaaagatatctggccaagcgcacaagaaattgcccgtgcggtagaacaagtctccacagaaatgttccgcaaagagtacgcagaagtttttgaaggcacagcagagtggaagggaattaacgtcacacgatccgatacctacggttggcaggaggacagtacctatattcgcttaagccctttctttgatgaaatgcaggcaacaccagcaccagtggaagatattcacggtgcgcggatcctcgcaatgctgggggatagtgtcaccactgaccatatctctccggcgggcagtattaagcccgacagcccagcgggtcgatatctacaaggtcggggtgttgagcgaaaagactttaactcctacggtagccggcgtggtaaccatgaagtgatgatgcgcggcaccttcgccaatattcgcatccgtaatgaaatggtgcctggcgttgaaggggggatgacgcggcatttacctgacagcgacgtagtctctatttatgatgctgcgatgcgctataagcaggagcaaacgccgctggcggtgattgccgggaaagagtatggaagtggctccagtcgtgactgggcggcaaaaggtccgcgtctgcttggtattcgtgtggtgattgccgaaagctttgaacgaattcaccgtagcaatttaattggcatgggcatcctgccgctggaatttccgcaaggcgtaacgcgtaaaacgttagggctaaccggggaagagaagattgatattggcgatctgcaaaacctacaacccggcgcgacggttccggtgacgcttacgcgcgcggatggtagccaggaagtcgtaccctgccgttgtcgtatcgacaccgcgacggagttgacctactaccagaacgacggcattttgcattatgtcattcgtaatatgttgaagtaacaactatttgcttgccggttattttgcttccggcaagcaaatgaattacacaatgcaagagggttatttgttcagcaaatggcccattttctcggctttggtatcgagataatgttcgttattggggttacgacctacaatcaatggtacgcgttcaacaatattaatccctgcttcggtcagaatttcgacttttttcgggttattggttaacaagcggacttcattgacgccaaggagtttgaacatatcagcgcaaagagtgaagtcgcgctcatcagcggcgaagcctaactggtggttagcctctacggtatcgtaaccttgatcctgcagtgcgtaagcgcggattttattcagcagaccaatgttacgaccttcctgacggtgatacagcaaaataccacggccttcctcggcaatttgcgtcaatgccgcttcgagctggaagccacaatcgcagcgcaagctgaacagggcgtcaccggtcagacattcggaatggacgcgcgcaagtaccggggtatgcccggaaatatcgccatagactagcgcgacatgatcgtgtccggttgccagttcttcaaatcccaccatcaggaaatcgccccatggggttggcagtttggcttctgccacacgtttaagctgcatgaaattctccagataatgctggttctgtattggcttattttgccataacgagaaggggttcacctaatcacgacgcgtcgatcgttcacggaatggcacaaatctgtcaatttttcctggaactggcgttttcagttatgattgtgggacttatcaaaaaggagaggccatgcgtagcattgccagacgtaccgcagtgggagctgcactattgcttgtcatgccagtagccgtatggatttctggctggcgttggcaacctggagaacaaagttggctactaaaagcggctttttgggttactgaaactgtcacccagccctggggcgtcattacacatttgattttattcggctggtttctctggtgtctgcgttttcgcattaaggctgcctttgtattatttgccattctggcggccgcaatccttgtgggacaaggcgttaaatcctggatcaaagacaaagtccaggaaccacgaccttttgttatctggctggaaaaaacacatcatattccggttgatgagttctacactttaaagcgagcagaacgcggaaatctagtgaaagaacagttggctgaagagaaaaatatcccacaatatttgcgtagtcactggcagaaagagacggggtttgcctttccttccggtcacacgatgtttgctgccagttgggcactgctggccgttggtttgctgtggccgcgtcggcgaacgttaaccattgctatcttgctggtctgggcaacgggagtcatgggaagccgcctgctgctcgggatgcattggccacgcgatctggtagtagctacgttgattagctgggcgctggtggcggtggcaacgtggcttgcgcaacgaatttgtgggccattaacaccacctgcggaagaaaatcgcgaaatagcgcaacgagaacaagaaagttaacgctggttgattttccgaatttagcccttaaatcatcaacaatgcgtgtggatgccatttcgcagacggcgcgaaaatggtactttaaagggctattgcggtaagttgaccataatttattcgctctaaccacataacgggaagtaatgtgaaatatttactcattttcttactggtgttagcgatcttcgtgattagcgtcacgttgggtgcgcagaacgatcaacaggtgacgtttaattatctgttagcgcaaggggagtaccgtatttccacattgctggcggtattgtttgctgcggggtttgctatcggttggttgatttgtggcctgttctggctgcgagttcgtgtttccctggcgcgcgctgaacgtaaaataaagcgactggaaaaccagcttagtcccgcgactgacgtggctgtagtgccgcacagcagtgcggcgaaggaataactttctatgctggagttgttgtttctgcttttgcctgtagccgctgcctatggctggtatatgggccgcagaagtgcgcaacaaaacaagcaagatgaagccaaccgcttgagccgtgattacgtagcgggggttaacttcctgcttagtaatcaacaggataaagcggtagacctgtttctcgatatgcttaaagaggatacaggcaccgttgaagcccaccttacgctcggaaacctgttccgtagccgtggcgaagttgatcgcgctattcgcatccatcagaccctaatggaaagcgccagcctgacctatgaacagcgtctgttggcgattcaacaactggggcgtgattacatggccgccgggttatatgaccgcgcggaagacatgttcaatcagctgaccgatgaaactgacttccgcattggcgcgctgcaacagttgctacaaatctaccaggctaccagtgagtggcagaaagcaattgatgttgccgaacgcctggtgaagctgggtaaagataaacagcgcgtcgaaattgcccatttctactgtgagttagccctgcagcatatggccagcgacgatctcgatcgtgccatgaccttgctaaaaaaaggggcggcggcagataaaaacagcgcccgcgtatccataatgatgggacgcgtgtttatggcgaaaggagaatacgccaaagccgtcgaaagtctgcaacgcgtgatatcccaggacagagaactggtcagcgaaacgctggaaatgttgcaaacctgctatcagcagttgggtaaaactgccgaatgggcagaattcctgcagcgtgcggtggaagagaacaccggtgccgatgctgaattgatgcttgctgatatcatcgaagcgcgcgacggtagtgaggccgcacaggtctatattacgcgccagcttcagcgtcatccgaccatgcgtgtgttccataagttaatggattaccacttaaatgaagcggaagaagggcgtgccaaagagagcctgatggtgctgcgtgacatggttggcgagaaggtacgtagtaagcctcgttatcgttgccagaaatgtggttttaccgcatacaccctctactggcattgtccgtcttgtcgggcctggagtaccattaaaccgattcgcggtcttgatggcctgtaatttttaaaaaaaatccgactttagttacaacatactaattattaatgttccattgtgctccggcaacgacggcgcagaaaaagcctgccaggggagaaatcgcaactgttaattttttatttccacgggtagaatgctcgccgtttacctgtttcgcgccacttccggtgcccatcatcaagaaggtctggtcatgacgttaactgctagttcttcttcccgcgctgttacgaattctcctgtggttgttgcccttgattatcataatcgtgatgacgcgctggcctttgtcgacaagatcgacccacgcgattgtcgtctgaaggtcggcaaagagatgtttacattgtttgggccacagtttgtgcgcgaacttcaacagcgtggttttgatatctttcttgacctgaaattccacgatatccccaacactgcagcgcacgctgtcgctgctgcagctgacttaggcgtgtggatggtgaatgttcatgcctctggtggggcgcgtatgatgaccgcagcgcgtgaggcactggttccgtttggcaaagatgcaccgcttttgattgctgtgacagtgttgaccagcatggaagccagcgacctggtcgatcttggcatgacactgagtcctgcagattatgcagaacgtctggcggcactgacgcaaaaatgtggccttgatggtgtggtgtgttctgctcaggaagctgtgcgctttaaacaggtattcggtcaggagttcaaactggttacgccgggcattcgtccgcaggggagtgaagctggtgaccagcgccgcattatgacgccagaacaggcgttgagcgctggtgttgattatatggtgattggtcgcccggtaacgcaaagcgtagatccagcgcagacgctgaaagcgatcaacgcctctttacagcggagtgcatgatgagtgattccaacagccgtctggtctacagtacggaaaccggacgtattgatgagtccaaagcggcccctgtacgccctaaaggcgacggtgtggtgcgtattcagcgtcagaccagtggacgtaaaggtaagggcgtttgcctgattaccggtgtcgatctcgatgatgccgaactgacaaaacttgcagcggaactgaagaaaaaatgcggctgcggcggagcagttaaagatggagttattgaaatccagggcgataagcgtgatttattaaaaagtctacttgaagcgaaagggatgaaggtaaaactcgcaggcggttaacataaaaagccacggatatatccgtggctttcgaatattttactgtgcgtattattcagttatttcgtactgaacagaatcaagcgtattataattgcgagtcgataatcgacatttatttacgattatttaccgacctggtgaccaataacacctccgacagctgcaccacctaatgtacccaacgtactgccatcggtcagtactgcaccgcctaatgcccctgcacccgcgccgattgcggtgttgcggtcccgtttagaccagttagaacaggcactcagagacattgccaaagtaattgccagaacagccgcggtcatttttttgctcgttacaaacataatactctctcctgaatttatgattcacggaagtaagctctctataactataatagctaagaataagtctggtgaaattattccgtgaaatctgctcgcgcgcagggttatatcacgcaggtgataatgacttcctgttatatcgctgataataattttatatcttgagagtgttaataacaggtaaatagtcttaattatcaaccaggaatcatcttagagcggatgatttgccaaactgcaaatcatccgtagagaagggaaatggttaaatgtcaacgacgtgaatggtgagtttactgtgctcaagatgcatcagatcgctggcgcgtattttgctatcggtaatcacgcgattgaatcgctcaacgggaccgatggagtaactatgtacagcaccaaatttgctgctgtcagtcaggactatcgcttcgcactctttttccagcacggcattgaccacatcggtacgcatcatatcgcgaccggtaaatccagtttcaggttgccagccatcaataccaataaatgctttgctgaaatgcacctgttggatgcactggcgtgtcaaagggccaaccatactttcgctttttttctgatacacgccaccgagcaaaataacttcacaaggcgcgtctttcagcaaatgcgcgatgtagctgctgaccgtgatgatagtgacatttttcttctgctcgcccagagtccgggcgagtagggcattgctgctgccattttcgataaagatggtttcgcccggttgaaccaggctcgcggcaaactcggcgagttcacgcttcagcgtatagttgctcatcatacgggtttcgacgtcatcactatcaaggctaacagcaaagccatgtgcacggcggaggtaactcagtttttcgagtgtgttgagatcctggcgaatggtaacttcagaaactccagtggcttttgccagatcggttacgctaacctgaccctggtcaatgaccatctgtagaatagtttgttgtcgggaattcatcgctgtaattcttataacgttataatacttaataaaaaaatactgacgcgccgggcatcctcaaataggaaaacctgaaggcacgattgttaaatctcccacggtgccttcgggatgtctggcgtagattcagcaacctggcgcaagagttctgctttaagtatctcgagattatggatcgcagagtggtaatcgcctgccacaaggatatctaacacaatatcaatacgttcggcaacgcgctgggcatcaaattcagacatcaaggacatccttatagcaaaagggggaaaatgaataatgcaaaaattgccgctaaaagagaagtgtttaacagcaacggctaattatcatccaggaatacgatatataatgacgggatatagcgctaagtatatatattcatctacttatgcgcgcttcagatagcgtttataccagcgttcgaaggcgacggcgggcatcggtttggcaaacaaaaatccttgccgctcattgatcccgttcttggttaaaaaagcatcttcctttgcactctctacaccttcggcgatcacctgaagattcaatgcctgggccacagcgacgatcgcccggaccagactctggctgacaggttgtttgtgaatatctcgaacaaaaacctggtcaagtttgatggcatcgatcggaaagcgcgccagttggctaagactagagtagccggtaccaaaatcatccagatgcacttgcgcacctagttggctaaattgttgaataacagacagtgccagttcatcattctcaatcagacaactctctgtcagttcaacatctatagggcagtattcaaaattgagttcctggagaacctgtttcagggcggtgaaaatggtttgatcggcgagctgacgtgcagaaatatttaccgccactcgcaggtttatgcctttatcccgccactttgccacctggcgtacgacatcgagaatcacccaacggcctaaaggcacaattagcccactctcttcggcgtaggaaatgaagtccaacggtggaatcaacccacgttcaggactctgccaacgtactagtgcttccagactgcgcacttcgccacgccaggtgattttcggttgatagtgaataaccaactgatcgttttccagtgctttacgcaagttggtatccagccagagatattcaaatacccgttgattcatttctggggtaaaaacgcaaaattgtcctcgtccgccttccttcgctgtgtacattgctgtgtcggcgtgacgaataatagccgtgctgtcactaccatgttcgggagagagtgcaatacctacactacagctggtataaacttcaattaaaccaatgcgaaaggggagccgtaagcgggtcaaaattcgacttgccattgcttccagcgcgctttgactggtgttggatgccagtaccagaaactcatccccacctggacgagccaacacctggtcatgttcgagacagcttaaaatagccaaactcacgtcgcgtaataactggtcaccaaacaaatgcccataggcgtcgttgacctttttgaaattatccaaatcaagatacacaaccccaactttattgttatctgcatgattaatagcgtgatcgattaaatcctgcattgcgttacgattcggcagtccggtgatactgtcggtatttgccagaatacgcagtcgctcctgagcgcggcgctcttcggtaatgtcggtgccggaacagattaaaaaaatctcgtttttgccactgccgctgtggacaaatttattgcgaaacagaaacagccgctggcctttacatgttggtatccacagttcgacttcatatgcattgccgcttcgaaaaaatacacggttattgcgcctggatgccgcagcttcacgacggctcataaacagtttaaacacgctttgcccaatgacgtcgtgttctttcaaccctgtgtaatcttcacataaccgattgaagcgttggatattcccccggctgtcgagaatcactattgcggaatgtgcttcagaaactacctgctcagcaaaggaaagcccgtgacttaaatcacgagcaaccgccggtgtgtcatgccatgcagacgcgttgccagcccattcccgtttattgatttttcgtcctaccagatgcacagaaagatcgctttcatcgacggtcagactcatcatcaggctggaggtgatgaccgtcatttccctgatgcgagcagcctgttcggcagataactgcaatgtacgatcaggttctgtggtttcggtggtagaaaagcgcaaaacatcgctgctttccgtcaaccgccagtatggattgtggcttccgagaaagttgtacaacgttgtggactccctaacggttttcatgatgcatatcctccggttaacagcggagtccgcggttaaataaaaggaacaacatgacttacatgaaattaacggcggctaaacgcattgttttttttatatatttatttgtaatccagttttggaaaaacgccagttttcaaacgaaagtcagttaaaaaatctgcctggatataacgaaggtagagcggggaaataaacggcccatccatgaggaatgggccgtgaaaggagattacgcgaccgggcgcgcaataatgctgcgggtttccatgcggacttcggcaatagtgacgtcaataacgtcagtcactttgtaaaccgtttcacctttaatttgtacagtgccgttttcctggctgcaaaccagttcatcgcgcacagcgtgtaagaaaggtgccggaataaaggcgatagcgccgttatcaaccaaacgaacacgcatgccgccacggctgatatcgacaatttccgctgcgaaacgggtgtcggtcccggctttgtctttcaggaagcgtgcgtataaccagtcaccaacatcacgttctgccatccggttgagacggcgacgctcggccatttggacagtgatttcatcctgtgggcgcgtcgcagtttcgcctttgataaccgctttcagcagacggtggttgatcatgtcgccatatttacggatcgggctagtccaggtggcgtatgcttccagaccgaggccaaagtgaggaccgggttcagtgctaatttcagcaaaactctggaagcgacgaatgcggctgtcgaggaaaccagttggttgcgcgtccagttcacgacgcagtttgcagaaaccgtccagcgtgagcacttcttcggcatcgacatgcagaccgtgcgttttcagcaacgctgccagcgcgtcggcattcgccggatcaaagcccatatgcacgttatagatgccaaaaccgagcttatcgcgcagtacgcgggccgcacaaatgttagcggcaatcatcgcttcttcgacgatacggttggcaatgcgacgaggctcggcgacgatatccagcacttcacctttttcaccgagaataaagcggtaatccgggcgatctttaaacaccagtgcgtggttatgacgccactcgccgcggcgttggcaaatttgcgctagcaaacggacttgttcggcaattgcttcactttcaggctgccagtcaccggtattttccagccagtcagaaacctggtcatacaccagctttgctttggattcgatggtggcggcaaagaattcgatattatcttcaatggtgccatcagcggagagcgtcatgcggcatgccagtaccgggcggacttcattggcgcgcagactgcagagatcgtcagaaagctcgcgaggcagcatagggatgttgaagccaggcagatagttggtgaatgcgcgaattttcgcggctttgtccagcttgctgccttcagcaatccacgcggttggatcggcaatcgccacaatcagctgaagtttgtcatccggcaacgccttagcgaaaagggcgtcatccatatcttctgtgctggcactgtcgatggtgacaaaatccagcgcggtcagatcttcacgaaccagaccttcatcgagcatttcggtagcgacgccgtctggtgcttctttttccagattatggcgtgcaagggtaacccaccacggtacaaagtgatcgtcaccaaaagtgatgtattgtgtcagttctgcatagaaagaacgatcgcctttcagcggatgacggcgcatttcggcaaccgcccagtcgccttctttaaactcgtggttcaggccacgggctgcgcggcaaggaatggcgtcttttaagagtggatgatcaggaacgatggccagacggtcatttttgccctgaaccttacccacgaaacgagtcaggaacggttcaaccagttcttctggctctgcggattcacgttctttttcactgtggatcaccgcgataattcggtcgccatgcatgacttttttcatctgcggcggcggaatgaaataacttttttgcgcgtcgacttccaggaagccaaagcctttttctgtggcttttaccaccccttcagcgcgtggcgtctgggaatgcagttgctgtttaagctgcgctagcagcgggttgtcctgaaacataattgtctattttggtggccattagagcggctgacagttttacgcgaatctgtctgacgcggcaaggttaatatgtctcacccaacgcgatttttaagcgatttatccagccacacagcccgctccataccagcagattaataatctgcgtactacttttttcgtgttcgagtaaagggctgaactgggcggcgctaaagcgatcgggtgctcgggtcagccattgtatcgcctgaacggtagcgcgctcaacagaatgacggtcagcccattggttaatttcattttcgcccttgcgcataagggtgctgatttttttatattcattactactatccatacaggtggcaaaacaagcaggactgccatttatacgcgcgcataacaacgccgcaagctgattatccggctgtgtattgccccgtgtgctgtttaacaacttttcgagaagggaaagactaatagggtggagagagagtatttcggccagttggcaaagttctgcagtactactttttgtgtgctcttcaggtagtttttccacctcatagctgcttcgccagcgtaaactttcatcagcaaacagactcgcgtcggcgtagttttgtatctccagcccgggtaaccagcgtaccggatgcccgagataagcctgaaatgtcgcaattgtccgcgcctgaaagccaataaaaccaatgatttggctaatgatcacacagtcccaggcagtaagaccgacgtcattcagatgctggcggcttcggttgtcgataatagaagggctgctagccagttggcgggcatattgcgtgatttgtgccaaccgatgattactttccctggtggaatcaggcccggggagcggcgtaagtcgcgcgctatagtagttacataaccgctggacgccgcaaacctgagcaaccgtcagggccgtgctcaagcgttcataagcggtgaaggtctgactacgggtcacggtaagctggtcagggaacaaatccactgcaagaacacgcgcagggtccagccaactaaggaagggggccagcgtttctttttcaaggatcacgtcgagtagaaagggatcgctgacctttgcggcttccgggaccagaggcagaacgtcatactccgtagtactggattgcgtttcatgataccagtggcttttgccggtgatgtggcgttgttccatgggcgctccttggtcgtaaaggaaatcgttatcctgacgcaaggcgggaaggggagaaagacggatcggcgataacaaatatcagaaaggtataacagagataacgggcggcagaacgccgcccatctttaccaacagaacgattatttcagttcgagttcgttcattgcagcaatgctgaaaccgccgtcaacgtggaccacttcaccggagataccggcagagagatcggagcacaggaatgccgcagagttacccacatcttcaatagtaacggtacggcgaatcggggtaacggcttcgcaatgagccagcattttgcggaagtctttgataccggaggccgccagagtacggatcggaccagcagagatggcgttaacacgcacaccttccggacccatcgcgttcgccatatagcgcacgttcgcttccagagacgcttttgccagacccataacgttgtagttcgggatagcgcgctcagcgccaaggtaggaaagggtcagcagggcagaacccggattcagcatggagcggcaagcttttgccattgcaacgaagctgtaggagctgatgtcgtgggcaattttgaagccttcacgggtaacggcgttaacatagtcaccatccagctgatcgccaggtgcaaaaccaatagagtgtacgaaaccgtcaaatttcggccaaactttccccagttcagcgaacatggtgtcgatgctggcatcttctgcaacatcgcactgcagaacgatgtcagaacccaattgagcggcaaattcttctacgcggcctttcagtttgtcgttctggtaggtgaatgccagttcagctccttcgcggtgcatcgcctgagcgataccgtaggcgatggatagtttgctggcaacaccggttaccagaatgcgcttaccggaaagaaaacccatagctttaatccttattgttgatgcttgttgtgcctgaaaatcaggcgattcgtcgttttagtaaacagtacgaacagataaacggttattataatcaacctggctgtgagtagctatagttgccaggtccgaccggagcaggctgcggcagggggggcgcttttcccctcaccctaaccctctccccagaggggcgaggggaccgtattgtgcaaatattgttaccccagcaacaaacaggctcatacagcccctaaccctttcatggcgatggctgggacggttcagaccttgccgaatattctccagcaccgtctccatgttttcaccacaacagctattcggctcggtctgccccctcgctctttcagggagagggactccggcggttcagttcctgcagaatattctccagcaccgtctcctcattacaatcaatctcgttattccagaaacgcagcacggtccagccctggctctcaagccagctagtgcgcctggaatcataggcaactgctaaatcatgctgcccaccatccagctcaacgactacacgcgcgctgcagcaagcaaaatcgagaatgtagctccccactggatgttgacggcgaaatttgaaatcactaaaacgtcggctgcgaagatatcgccagagctttcgttcctgcaaagtgagattgcgtcttaaatcacgcgcattacttttaattttatctatcacctcattctgacaagatttaatcttttgtcagaatgaggtgaataatctggaaggaggattcagaaaattagcgatctttacgccacgcatccgccgtcaatgcctcgccaaaatgaccggcaatcagccgtttggtgagttcatgcagcgggcttgccagcacatccgcggtgctgcctcgctcgacaacctcgccctgatgcatcaccagcacctggtcgctaatgtgcttcatcattccgatatgctgggtaacataaatatagctaatgccctgtttttcctgtaattccagcatcagattaatcaactggctacgcatgctcatatccagactagcgagggcttcatcggcaataatgacttttgggcgcaatatcagcgcgcgcgccagacccagacgctgtttttgtccgggtgccaacatatgcggatagtaactgacgtgatccggtagcagcccaaccatacgcatcgtttcaataatctgtttgcgacgctgttccggttccaggtcggtgttcaggcgcagtggaaaatccagaatttggctgatacgttgacggggattcaagctggtgctaggatcctgaaaaatcatgcgaatacgctgactgcggaaggaataatcgccaaaatgcagtggatgatcgtcaatcaataactcgccgctggtaggctctatcattcccgccagcatttttgccagcgtggatttaccgctaccattctcgccaataatcgccagtgtctggccttcacgtagcgtaaagctcaagggttttaccgcttctacggtctgacgacgaaaccagccggtccggtagcggaacgttttacttaaattacgcacttcaagcagcgtttcgatcatctcactctttctccatgttcagcgggaaatgacaggcatagagatgatttttcgcccccgtcaaacgtggcgtcacaatgcattctcgttgtgcatacgggcaacgtggccccagacgacaaccaatcggtaactgttccagcagtgggatagcgccgggcagcgtattgaggcgacttttatgcggcatcgcgctgccgaagtctggtatcgcgcggatcagcgcctgggtataaggatgatgtggcatcgtcaccaactccttactcggcgcggtttccactgtttgaccgcagtaaagcacgttaattttatccgcccattggctaagcatttgtaagtcatggctgataagcaaaatagtggtattgctgttttggttgagacgcgtcagcaggcgaaagatttgcgcctgggttgttggctccatactgttggtcggttcgtcagcaatcagcagacgcggttgattcgccagtgcaatggctatcatcactttctgacattcaccttcggtcaactcatagggaaaactgcgcatcgcatctttgtgatctttaatccccacgcggtgcagcagttcaatggcacggcgtttgcgccagccaaaacgctgccaccaacggcctttataggtccaggctgggatgttttgcatcaactggcggcccacacgttcactagggtcaagacagctctgcggttcctggaaaatcatgctcacgttatggccaaccagtttgcgccgttcgcgtgcggagagacgcagcaaatcgatatcatcaaaacgcatacggtcagcagtaacacgccagttatctttattcaccccacaaatcgctttcgcaatcaaactcttgccggaaccggattcaccaacaagaccgcggatttcaccttcggttaaggtcatacttacccggtcgacggctttaacccactcatcaccggttttaaattcaatggtcaggttacgaatatcgagtaatggcattattccacccccgcaataatcgcacgacgaacgccatcgccaaggaggttaaccaacaacacgctaatcataattgccgcacctggcagcatgacagtccacggggcgacataaatcagttccagcgcatcaccgagcatcgctccccattcagggctggggagttgtgcgccgagatcgagaaagcccagcgcggcgatatcgagaattgccatgctcagtgcgcgggtgatctcggtgaccagcccggcggtgatgtttggcatcacagcaaaccagagaatattcagcgtacttgcgccatccagacgggcggcgataacgtactctttttccagttcgtcatgcaccatgctgtaaatgctacgtaccatacgcggcagcaatgccagccagacagcaaacatagcgtgggacaaactcggtccggcaaacgctacaacgataattgccaacagcaggctagggatcgccagtaaggtatccagaatatggttaagcaccgcactgcggaggccgtgtgtcgccccggcgaaggtgcccagtaccaggccacagatcgtcgcggcaagcgtcaccacaaatgcgccacccacggttggcgcagctccgctcagtaaacggcttaaaacatcgcgtccgaggtcgtcagtccccaggaagaaagaaacttcgccatagcggctccaactcggcggcaataattgataaccgagaaattgctggtcgatgccgtaaggcgcaaaccagccgccaaaaatacacagtacagccagccccgcgcagccgtacaggccgaccatcgcagaggcgtcactataaaatttgcgccaggcggtacgcagcgtgcccggcgggcgcttttcgctgtatacgctatcgtaaggcataccattccttatgtttcagattatttatcgtaaggcataccattccttatgtttcagagggttagccatggcacccaaaatatcagaaatcacgttaacaataatgaccagactgccacacaccatcactccggcggaaatggctgcgtaatcctgctggcggatggcgttaattaaccagcgccctaaacccggccagctaaaaaccatttcggtgatcatcgccagcgtcagcatggtggaaaactgtaagcccaggcgaggaataaccggcggtaacgcgttatgcagaacgtggcgacgcaaaatagtaaagcggctcaaaccgcgggtcgccgccgcttttacatagttctggtcatacacttcgatagtgctgatacgcatcaggcggatcacttcagttgttggcgcaacgctcagggtgatcacgggcaatatcatatggcggattgcgctcatgatcatttcatcccgccatggactgtcgctaagccaggcatcaatcaacgcaaaaccggtaatcggtttcacttcgtagagcagatcgaaacgcccactaacgggcaaccaacctagcgtgagactacaaaacagcgtcaacagaagcgccagccagaacaccgggatactaaagcccagtaaggcgatggcgttgatcaagttatcctgccacttatggcgcgtaatcccggcaatcatccccacggggatgccaacaatcagcgcaaaaccgaaggcgaggatgcacagttccatcgtcgccgggaagacctcttttaactgttcggcaatcggttgaccgttaatgctggaaacaccaaaatcccagtggatcaggccgttaaaccagaacacccaggcattccacagactcgcgccttgtaacggcgcatgaggggtgaaatagctcaagctgaagccaacgaaggtcagcaggaacaaggtgacaatcaataacaaaatgcggcgtaaggtgaagataatcatggttttttcacctcatcctgtttctcgcgatacaccccagcaaaggaggcgttaccaaacgggctaagtaccagacctttgatatcgtaccgataggcctgcaaacgcaaactgctcgccagcggcaaaatgggcaattcctgcgccagaatactctgcgcttcgtcataggcttcaatacgcgccgccagctgctggctagagagcgccttacgcaatacgctgtcgaatttcggatcgcaccagtgggcgaggttggtctggctatgaattgccgcgcagctcagtaacggacggaagaaactgtccgggtcgttactgtccgtcgcccaaccggataacgtcagatcatggctcatatccatcaaccgcgcctcctgaaagcgaccttctaccggcacaatcaccacttttacgccaacctgcgccatatccgcctgaatcagttcggcagttttcagtggactggggttccacgcctggctacgtgtgggcacccacagtttcagcgttaaattttccagccccaagctcttcaactgttcgcggcttttcgccggattgtattcagtaattttagcctcgttgtcataggcccagctggcgcgcggtaaaatagaggccgccgtttcagccgtaccataatagatggattgcatcaggcgctggttattaatcgccagtgccagcgcatggcggacagcgggattatttagcggcggtttggcggtgttaaatgccagataggcgacgttcatcccaggacgcagcgttaaacgcaagcgcgggtcgtcacgcaaaatggatagctggctggcagcaggccaggccagaacgtcgcattccccggtcaggagtttgctcagacgtccggtgccgccggagcctaaatccaccactacctgcggcattaacggtttaccgcgccagaagtcatcatgacgttgtaggcgaataaattgcccggcgcggtattcgctcaactgatacggaccggtgccgaccggttgacggtcgagttgctcctggcgatcttctttctctaacttccgggcatattctgcgctcatgacgctagcataatgggttgcgaggtgccacaaaaaagaagcatccggctgggcgagtcggaactcaacggtatgattatccagtttgcggacgcttttcacgttatcggcaaattgcaggctgtcgaagtaggggaagttgctgccgttgacgttatgccacgggttgttgcggtcaaaaattcgctggaaggtaaacaccacatcgtcggcattcattttacgagtgggagtaaaccagtcggttttttgaaacggaacatcgcgacgcaggtggaagcgataggtcgcgccgttgtcgagtacttcccagctttcggcaagttccggcatcaggcgataggtatagggatcgacatccagcagtcgatcataaaactgggcggcaagggtatcgacaattaacccactgctcgctttggatgggttaaaggtgttgacttgcccgctgacgcaatagacaaaaccgctgtcgcggatatcagcatgcgggggagattcaggcgcggcgattgcctgaccactcacaagtccagcaatcaccaaaagagagcttaatacctggcgcataatattaagggattttatgtaaagaggctatcttactaatatttaatgacatttgccattaccgtttgtgttcaggggtcgtaatgagggccgtgtggttggtcgttgaacaggtgacgtcgccatctgttcaacattcgtacccgtgatttctctataactataactcacagaacaacttagcgaggagcagagcggtacgatcgtgagaaacccattaaagcacgctgcagtgcgtgtcattgttagccagatgcggcgtgaacgctttatccggacaacgatactgaccgatcgtctgcaattaaatcattactcattaccccattgattcaaaaactctgcgatctcatcaatgcgtacgggattaatccccgcttcagcagccatttcatgttgggcttcttcgctgatctcttcattgttcatcaaacgggtgagcagtaactggaagtagtgggccagcggtgtgcgttcagcctctgcgacaggctctgcgcattcggtcgcgtactcatcggcaatatcaaaatattttagcgggatatcgtggttcattatttgcccctggggttaatgcgctaagcataagggcggatgatagcactcgtgatccgggtcatacatctttttatagttaatggcgcggcgcgttaccctcaggcaggataatgcgccgcgcatccgactattacgtttcactcaccggcgttctgtcaccatcatacaacggcactttgcgatagcggcggatcagataccataaatatgcgccgcctaagctagcccataccagaccgagtgtcagactcgtactctcgaggttaacccacagcacacccaccgtcagcgcgccaaccagcggcatcagcaaatagtggaagtgatccttccagcttttattcattcctttacgccgccagaaatgattaaacacgctcagattcacgaaggtaaacgccaccagagcaccgaagttaattaacgctgtggcggtaactaaatcgaagaacagcgcgctcaacgcgacaatcccgaccataatgacgttgagtgccggagtccgccattttgggtgcacatagccaaacacgcgctccggaaacacattgtcacgccccatcacatacagcagacggctcacgctggcatgactagccaggccagaggctaacgtgttcacaaacgtggtgcagaggaaaatgctctggaagagcttgccgccgacgtacagcgcaatttcaggcagtgcggcatccggatctttaaagcggctgatatcgggaaagaacagctgcataaagaagctcgccgcgataaagataacgccaccgtagaccgccgtcaggaagatggctttcgggatcacgcgtgcggcgtccggcgtctcttcgctaagcgtggtcaccgcatcgaaaccgaggaaggagaaacagacaatcgtcgccccggtaataatcgggatcaggtgcgcgttctcgctgataaacggctgaagactccagacggtgccaacgccttctcctttatgcagtccctgaactaccaggaagataaacaccaccatgatggagatttgcaccagtacaaacagggtattgaagttagcgaccaggttgacgctcttcagattcgcggcggttaaaatggcgacgaaggttaccacccacacccacggcggcacttccgggaagagggcggagagatagattttcgccaacaagacgttaatcatcggcaaaaagagataatccagcaggctactccagccgaccataaatccgacgtgcgggttaatgctcttttgcgcgtaggtataggcgctaccggcctccggaaactggcgaaccagtttgccgtagctgatagcggtaaacagcacacccgccagcgccagcaaataggacgccggaacgtgaccgtcgctaatgccggagacaataccaaaagtatcaaatacggtcatcggcgtgagataggccagacccatcatcaccacctgccacaatttcagactttttcgcagacgggttttgccgggttgcgcagcaatattcagtggactattaatagccataattgctgcctcccctgcgtaataaggtttgcggtcgtgtcgacctgaaatcaaacctgtttagcaagggaagcaaagggggcggagtccagtcagtagcaggaggggcgcatacgcagcctccctcgccatgcggggatttaatcatcggcatcatctcatttcctcgtcacagtcttaatcgttaacggaagcccgttgccgcccgcgctccataacgcgacatccgggaaatgtctggattaccagcaaatgtcaggcctggctccgctcaggccgatgaaacaaccccgcaaggggtattacgcgtttttcaacatccactcaatttctgtttctgtgatgaggcgctcaaactgcaacagctcatcatttttacaggcgtgatagacatggcagaagcgttcgcctaaatagcggcgcaggtgatcattctcgataaactcacccagggcatcgctctggcgaatcggaaagggtaagccttcctgttccagcccgttgccttcgacttcttcctgcaacggcagctcgttatcaaggccatgcaaaataccggcaaaaatcgctgccatcaccagatatgggttggcatcggcacccgccacgcgatattccacgcggtgattatgacggtcgccgcacggaatacgcagggcgacggtgcggttgttatggccccagctcgcctgcgtcggcacatacattcccggctggaagcggcgatagctgttcacgtttggtgccagcaacgccatgctgctcggcatcaggtcaatcatcccggcgagcatctttttcagcagcgggctatcttcgccttccgcgtcagaaagcacgttctcgccacgattattttgcatactgatatggatatgcattccgctgcccgcgtgctcttcatacggcttcgccataaaagtggcgtgcatcttatgcttttctgccatcagacgcaccaggcgttttagtgccagcgcatcatcgcaggcttccagcacgttatcagtatggtaaaggttgatttcaaactgacccgggctggcctcagcgaccgcgccatctgccggaatcagctgtaactgcgccagttcatcaatatcattgagcacgtcggcgaagtggttgaggttatcaacggagtaaacctggctttgtgtattgcggtcatcggtgccaggcgcgcagggcggttgcagatacccttcagcgtcgcgctggcgatccagtaaatagaactccagctctaccgctacgaccgggaacaatccgcgctggcgcagctgctgccacaggcggttaagaacgttccgcggctcaacgtcaaagggagcgccatcttcatcgaccatggtcaggagcatctgaccgataaactctggatcggcggcagaaggagttaaggaaccgagaacaggaacacaggtacgatccggctcgcccatttcctgacccagacctgcttcttctactacgttgcccagaatatccattgcaaatacgctggccgggaaataacaccctttctcgagcttcttcaggctactaacaggaatacgctttccacggaagcaaccatttaaatcggtaagtaaaacatcaacatattgcgtattcgggtagcgctccaggtagcgtttcacttcctgcgtaaaggcgctaccccgcctctcttcactctgctgaacaaagttctctacttcaacgatattggtttccatgattcttcgcctttggtttgttttccgctcgttatcaaagcgtaaaatataatgaccaccattcgaatctgtatgcaaactaaatgtttgtcaaatgttaaattgagtttgcaaaaatgaaaacccactgctagattgaaaaaatattgaacataaaggtcatttaaagcgcagtaatggcgataatttagtccactttgtgagattgagcatggaaaatataatgaacaatccggttatcggtgtcgtaatgtgcaggaacaggcttaagggtcatgcgacccagactctgcaagaaaagtacctgaatgccatcatccatgcaggcggcttgcctattgcgctaccacatgcgctggcggaaccgagtttacttgaacaacttttgccgaaactcgatggcatttatcttcctggtagtcccagcaatgtgcagccgcacctatatggtgaaaacggcgatgagcctgacgccgatcccgggcgtgatcttctgagcatggcgataattaatgccgcactcgaaaggcgcatccccattttcgccatctgccggggtttacaagaactggtggtggcaaccggtggtagcttgcatcgcaagctgtgcgaacagcctgaattgctggaacatcgggaagatcccgaactgccggtggaacagcaatatgcaccgagccatgaagttcaggttgaagaggggggattactgtctgcgttgttacctgaatgtagcaacttttgggtaaactctctacatggacaaggggcgaaggtcgttagcccacggttgcgtgttgaagctcgcagcccggatggcttagttgaggcggttagcgtcatcaatcatccttttgcgctgggcgtacagtggcacccggaatggaacagtagcgagtacgcgcttagccgtatattgttcgagggctttatcaccgcttgtcagcaccatatcgctgaaaaacagcgactctgaccactacagtttaaggaaatgcaaatatgagtgatgagggactggcgccaggaaaacgcttgagcgaaatccgccagcagcaggggcttagtcaacgtcgtgccgccgaactctccgggctgactcacagtgctatcagtacgatagaacaagataaagtcagccctgccatcagtacgctgcaaaagctgctgaaggtgtatggtctgagtctcagcgaattcttttccgagccggaaaaacctgatgagccgcaggtcgtcattaatcaggacgacttaattgagatgggtagtcagggtgtgagtatgaagctggttcataacggtaacccgaatcgcacgctggcgatgatctttgaaacgtaccagccgggcacaaccactggggaaagaattaagcatcagggtgaggaaataggcactgtactggaaggtgaaattgttctgacgattaatggtcaggattaccacctcgtcgcggggcaaagttatgccattaataccggcatcccgcacagtttcagtaatacgagcgcaggtatttgccgaattatcagcgcccatacgcccaccacgttttaatctttttgttctgtaagccgggtaagcgcaatgcgcccggcaatctatacacaaaatcattcaagttgcatcaaggcggcaagtgagcgaatcccgatgagcttactcaggtaagtgattcgggggagcgaacgcagccaaggcagaggcggcttgaaggatgaagtgtatataaagaatgtcgccagaaataaacgggcatacggcccggggatctctgcgccctgacgttcacaaactgcatatatctgatagacgtgaaacaggagtcataatgaattttcatcatctggcttactggcaggataaagcgttaagtctcgccattgaaaaccgcttatttattaacggtgaatatactgctgcggcggaaaatgaaacctttgaaaccgttgatccggtcacccaggcaccgctggcgaaaattgcccgcggcaagagcgtcgatatcgaccgtgcgatgagcgcagcacgcggcgtatttgaacgcggcgactggagtctctcttctccggctaaacgtaaagcggtactgaataaactcgccgatttaatggaagcccacgccgaagagctggcactgctggaaactctcgacaccggcaaaccgattcgtcacagtctgcgtgatgatattcccggcgcggcgcgcgccattcgctggtacgccgaagcgatcgacaaagtgtatggcgaagtggcgaccaccagtagccatgagctggcgatgatcgtgcgtgaaccggtcggcgtgattgccgccatcgtgccgtggaacttcccgctgttgctgacttgctggaaactcggcccggcgctggcggcgggaaacagcgtgattctaaaaccgtctgaaaaaagtccgctcagtgcgattcgtctcgcggggctggcgaaagaagcaggcttgccggatggtgtgttgaacgtggtgacgggttttggtcatgaagccgggcaggcgctgagccgtcataacgatatcgacgccattgcctttaccggtagtacccgtaccgggaaacagctgctgaaagatgcgggcgacagcaacatgaaacgcgtctggctggaagcgggcggcaaaagcgccaacatcgttttcgctgactgcccggatttgcaacaggcggcaagcgccaccgcagcaggcattttctacaaccagggacaggtgtgcatcgccggaacgcgcctgttgctggaagagagcatcgccgatgaattcttagccctgttaaaacagcaggcgcaaaactggcagccgggccatccacttgatcccgcaaccaccatgggcaccttaatcgactgcgcccacgccgacagcgtccatagctttattcgggaaggcgaaagcaaagggcaactgttgttggatggccgtaacgccgggctggctgccgccatcggcccgaccatctttgtggatgtggacccgaatgcgtccttaagtcgcgaagagattttcggtccggtgctggtggtcacgcgtttcacaagtgaagaacaggcgctacagcttgccaacgacagccagtacggccttggcgcggcggtatggacgcgcgacctctcccgcgcgcaccgcatgagccgacgcctgaaagccggttccgtcttcgtcaataactacaacgacggcgatatgaccgtgccgtttggcggctataagcagagcggcaacggtcgcgacaaatccctgcatgcccttgaaaaattcactgaactgaaaaccatctggataagcctggaggcctgaaatgaccgaacataccagcagttactacgccgccagtgcgaataaatatgcaccattcgacacgctgaatgagagtatcacctgcgacgtttgcgtggttggcggcggctataccgggctctcctccgcgctgcatctggcggaagcgggctttgacgtagtggttctcgaagccagtcgcatcggctttggcgcaagcgggcgcaatggcggacagcttgtgaactcctacagccgcgacatcgacgtgatcgaaaaaagctacggcatggacaccgcccgtatgctcggcagcatgatgttcgaaggtggtgagatcatccgcgaacgtatcaaacgttatcagattgactgcgactaccgccccggcggcctgtttgtggcgatgaatgataaacagctcgccacacttgaagagcagaaagagaactgggaacgctacggcaataaacagctggaattgctggacgccaacgccattcgccgtgaagtagccagcgatcgctataccggtgcgctgctggatcacagcggtgggcatattcatccgctaaaccttgccattggcgaagcggacgccatccgcctcaacggcgggcgcgtgtatgaactttctgccgtgacgcagatccagcacaccacgccagccgttgtgcgaactgccaaaggtcaggtgacggcgaagtatgtgattgtcgccgggaatgcgtatctgggcgataaagtagagccggaactggcgaaacgcagcatgccgtgcggcacgcaggtgatcaccaccgaacggctgagcgaagatttagcccgtagcctgatcccgaaaaactactgtgtggaagactgtaactatctgcttgattactaccgtcttaccgccgacaaccgcctgctgtacggcggcggcgtggtctacggcgcgcgcgacccggatgacgttgagcgccttgtggtgccgaaactgctgaaaaccttcccgcagctgaagggcgtgaaaattgattaccgctggacgggcaacttcctgctgaccctgagccgtatgccgcagtttggtcgcctcgataccaacatctattacatgcagggctacagcggccacggcgtgacctgtactcatctagccggacgtttgattgccgaactgctgcgcggcgacgccgaacgtttcgatgccttcgccaatctgccgcattacccgttccccggcgggcgcacgctgcgtgtgccgtttaccgcgatgggcgcggcgtattacagcctgcgcgatcgtctgggcgtttaatttccgattaaccgtgaagagtcaaaaggtgtgaaacatgagcaacaatgaattccatcagcgtcgtctttctgccactccgcgcggggttggcgtgatgtgtaacttcttcgcccagagcgctgaaaacgccacgctgaaggatgttgagggcaacgagtacatcgatttcgccgcaggcattgcggtgctgaataccggacatcgccaccctgatctggtcgcggcggtggagcagcaactgcaacagtttacccacaccgcgtatcagattgtgccgtatgaaagctacgtcaccctggcggagaaaatcaacgcccttgccccggtgagcgggcaggccaaaaccgcgttcttcaccaccggtgcggaagcggtggaaaacgcggtgaaaattgctcgcgcccataccggacgccctggcgtgattgcgtttagcggcggctttcacggtcgtacgtatatgaccatggcgctgaccggaaaagttgcgccgtacaaaatcggcttcggcccgttccctggtagcgtgtatcacgtaccttatccgagtgatttacacggcattagtacacaggactccctcgacgccatcgaacgcttgtttaaaagtgacatcgaagcgaagcaggtggcggcgattattttcgaaccggtgcagggcgagggcggtttcaacgttgcgccaaaagagctggttgccgctattcgccgcctgtgcgacgagcacggtattgtgatgattgctgatgaagtgcaaagcggctttgcgcgtaccggtaagctgtttgccatggatcattacgccgataagccggatttaatgacgatggcgaaaagcctcgcgggcgggatgccgcttagcggcgtggtcggtaacgcgaatattatggacgcacccgcgccgggcgggcttggcggcacctacgccggtaacccgctggcggtggctgccgcgcacgcggtgctcaacattatcgacaaagaaagtctctgcgaacgcgcgaatcaactgggccagcgtctcaaaaacacgttgattgatgccaaagaaagcgttccggccattgctgcggtacgcggcctggggagcatgattgcggtagagtttaacgatccgcaaacgggcgagccgagtgcggcgattgcacagaaaatccagcaacgcgcgctggcgcaggggctgctcctgctgacctgtggcgcatacggcaacgtgattcgcttcctgtatccgctgaccatcccggatgcgcaattcgatgcggcaatgaaaattttgcaggatgcgctgagcgattaatagcccaacgcaataatgtctgatgcgctgcgcttatcaggcctgcaaacgacgtattgattatgtatgccgaataaagcattcacgccgcatccggcaagttgtattgctcaacttcgttaaatctggtgctttttcaacaacgcgcggaactgatgataagttaaccccagtaattcagccgcgcgcttctggttatatttcccttgttgcaaactgagttgcagcaactctttttcctgctgcatctgaaactcacgtaaatccagcggcagtgttggaaggctggtggtttcactaacggcgatagcgtcttcaggcggacgccgtttaaagggatcaataatgatgtcatcaagcggataatcgctggtgccgtggcgatacacactacgttccaccacgtttttcaattcacgaatatttcccggccaacgataattcagcaatgtttctctggcgcgctccgtaaaccccgggaacagaggcagcttgatttcccgacacatctggatggcaaagtattctgccatcaacattatgtcgctttcgcgctcgcgcagtggtggcagttgtacaacatcaaaagccagtcggtcgagcaggtcagcgcgaaaagtgccttcattgaccatcgccgggagatcggcattcgtcgcgcataccaaccgcacattcacctgcaatggttggctgccgccaacgcgctccagttcaccgtactcaatcacgcgcaataatttctcctgcaccatcatcggtgccgtagcgagttcatcaagaaatagcgtaccgccgtcggcacgttcaaatctccctggatgacgtttttgcgcaccggtaaacgcccccgcttcgtgaccaaacagttcggaatccagcagattttcatttaacgccgcgcagttaagggaaataaacggcccttgccaacgggaggagagataatgcaggcggctggcaatcagctctttaccggtgccgcgttcgccgatgatgagcaccggtttgtccagcggtgcgagatggctaacctgttccagcacttcgagaaagctgttcgcctcaccaagtaaattatctttgtattctgccatgatgaaattcgccacttgttagtgtaattcgctaactcatcctggcatgttgctgttgattcttcaatcagatctttataaatcaaaaagataaaaaattggcacgcaaattgtattaacagttcagcaggacaatcctgaacgcagaaatcaagaggacaacattatgggtattttttctcgctttgccgacatcgtgaatgccaacatcaacgctctgttagagaaagcggaagatccacagaaactggttcgtctgatgatccaggagatggaagatacactggttgaagtacgttctactagcgcgcgcgcgttggcagaaaagaaacagctgactcgccgtattgaacaagcgagcgcgcgtgaggttgaatggcaggaaaaagccgaactggcgctgctgaaagagagagaggatctggcacgtgcagcgttaattgaaaaacagaaactgaccgatctgattaagtccctggaacatgaagtgacgctggtggacgatacgctggcacgcatgaagaaagagattggcgagctggaaaacaaattgagcgaaacacgcgctcgccagcaggcattgatgttacgtcatcaggcggcaaacagcagccgcgatgtgcgtcgtcagctggacagtggcaaactggatgaagcaatggctcgtttcgaatctttcgaacgtcgtattgaccagatggaagcggaagcagaaagccacagcttcggtaaacaaaaaagcctggacgatcagtttgccgaactgaaagccgatgatgcaatcagcgaacaactggcacaattaaaagccaaaatgaagcaagacaatcaataataacatccaggcggcgtccgaacgcgccgccgctcatcgtctaaggagtacttatgagcgcgctatttctggctattccgttaaccatttttgtgctgtttgttttaccgatctggttatggctgcattacagcaatcgttctggtcgcagtgaattgagccaaagtgagcagcagcgattagcgcaactggctgatgaagcaaaacggatgcgcgaacgtattcaggcgctggaatctattcttgatgcagaacatccgaactggagggatcgctaatggcgggcattaatctcaataaaaaattatggcgtattccacagcagggcatggtccgcggcgtctgcgccgggattgccaactattttgatgtaccggtaaaactggtgcgtatcctggtggtgctgagcattttcttcggtctggcgctgtttaccctggttgcttacatcattttgagttttgcgcttgatccaatgccggacaacatggcctttggtgagcagctaccttccagcagcgaattgctggatgaagtcgaccgtgaactggcggcaagtgaaacgcgtttacgcgagatggaacgttatgtcacttccgatactttcacgttacgtagccgtttccgtcaactgtgaggaaagttatgaatactcgctggcaacaggccgggcaaaaggtaaagcctggtttcaaattagcaggcaagctggtacttcttaccgcactgcgctatggcccggcgggtgtggcgggctgggcgataaaaagtgttgctcgccgaccgctgaaaatgttgctggctgtggcgctggaaccgctgttaagtcgggctgctaataaactggcacagcgttataaaaggtgaggggagtttcgcaaaaattgttaaatctcaggcgtataatggatggcaattttcatccatagaaggacgcttacatgtttaaaaaaggcttacttgctctggcactggtgtttagtctgcccgttttcgccgctgaacactggatcgatgttcgtgttccagagcagtatcagcaagagcacgttcagggggccatcaatattcccctgaaggaagtgaaagagcgcattgccaccgccgttccggataaaaacgacaccgtgaaagtgtattgcaatgccggacgccagagtgggcaagcaaaagagatccttagcgagatgggatatacccacgttgagaacgccggtggcctgaaagacatcgcaatgccgaaggtcaaaggttaaaagaattcaccatgagcggcgcttatgcgccgtttttttttctgtcacaccttatttacatccccatagattatttgcgtcagctcacaaatacgctttttccctggtaaaaaatgatttcctgcgtgactaaaacccttgtgctcaattgacagtttattttctgcggagtagtctctcgtttcatgggaccgctaccacggaaaggcaacatgaaacagaaaattacggattacctggacgaaatctacggtggaacatttaccgcaactcatttacagaaacttgtaacgcgtcttgagagtgcgaaacgattaattacacagcgacgtaaaaaacactgggatgaaagtgatgtcgtgttaattacctatgccgatcaatttcacagcaatgatttaaaaccattacccacatttaatcagttttaccatcaatggctgcaaagcatttttagtcatgttcatttgttgccgttttatccatggagttctgatgatggctttagcgtaattgattatcatcaggtcgccagtgaagcgggggagtggcaggatattcagcaactcggtgaatgcagtcatttaatgtttgattttgtctgcaaccatatgagcgcaaaaagtgaatggtttaaaaactatttacaacagcatccaggttttgaagatttttttattgccgttgacccgcaaaccgatctcagcgccgtcactcgcccgcgtgcgttaccgttattaacgccattccagatgcgcgatcatagtacgcgccatttatggaccacctttagtgacgatcaaattgacctgaattaccgtagccctgaagtgttgctggcgatggtggatgttttactctgttaccttgcgaaaggtgctgagtatgtccgcctggatgccgttggctttatgtggaaagagccgggaacaagctgcatccatctggaaaaaacacatctgattatcaaactgttacggagcattattgataacgttgcgccaggtacagtgatcattaccgagaccaatgttccgcataaagacaacattgcttactttggcgcaggcgatgacgaagcacatatggtgtaccagttcagcctgccgccactggtgctgcatgcggtgcaaaaacagaacgttgaggcgctttgtgcgtgggcgcaaaacctgacactaccttccagcaacaccacctggtttaacttcctcgcctctcacgatggcatcgggctaaacccgctacggggcttgttgcctgaaagcgaaatattagagctggtcgaggcgttacagcaggaaggtgcattagtaaactggaaaaataatcccgacggtacacgcagtccgtatgaaataaatgtgacctatatggatgcgttaagccgccgtgagagtagcgatgaagaacgttgcgccaggtttatccttgcccatgcgattttgttaagtttccccggtgtgccagcgatatatattcaaagtattcttggcagccgtaatgattacgcaggtgtcgaaaaactcggatataaccgtgcgattaaccgtaaaaaatatcacagtaaagagataacccgagaactgaacgatgaagctacattaaggcatgcggtatatcatgagttgagccgtttaattacacttcgtcgcagccataacgagtttcatccggataataattttaccattgatacgattaatagttccgtaatgcgtattccaagaagtaacgctgatggtaattgtctgactggattgtttaatgtcagtaaaaatattcagcatgtaaatattactaatctgcatggtcgggatctgattagtgaagttgatatattgggtaatgaaataacgctgcgcccctggcaggttatgtggattaaataaaaaggaacatctcatgattaaaagtaaaatcgtgctgttaagtgcactggttagttgcgccctgattagtggctgtaaagaagaaaataaaacgaatgtatccatcgaatttatgcattctagcgtggagcaggagcgccaggccgttatcagtaaattgattgcccgttttgaaaaagaaaaccctggcatcaccgttaagcaagtgcccgtggaagaagatgcctataacactaaagtcattactcttagtcgtagcggtagcctgccggaagtgatcgaaaccagccatgactacgccaaagtgatggacaaagagcagcttatcgatcgcaaagcggttgccacagtcatcagcaacgttggtgaaggcgcgttttacgatggcgtactgcgtattgtgcgtaccgaagatggtagcgcatggaccggtgttcctgtcagcgcctggattggcggtatctggtatcgcaaagatgtgctggcaaaagcggggcttgaggagccgaaaaactggcaacagctgctggacgttgcacagaaactgaatgacccggcgaataaaaaatacggcattgcgctgcctacagcagaaagcgtgttgacggaacaatccttctcccagtttgcgttatccaaccaggctaacgtctttaacgccgaaggcaaaatcacccttgatacaccagagatgatgcaggcactgacctattaccgcgaccttactgccaacactatgccgggttctaacgacatcatggaagtgaaagacgcctttatgaacggcaccgcgccgatggcgatttactccacctatatccttccggctgtgattaaagaaggcgacccgaaaaacgtcggtttcgtggtgccaaccgagaaaaactctgcggtctacggcatgttgaccagcctgaccattaccgccgggcaaaagaccgaagagacggaagcagcagaaaaatttgtcacctttatggagcaggcagacaacattgccgactgggtgatgatgagcccaggtgctgcgctgccggtgaataaagcggtggtgactaccgccacctggaaagacaacgacgttattaaggcgctgggtgaactaccgaatcagctaatcggtgaactgccaaatattcaggtttttggcgcagtaggggataaaaactttacccgcatgggtgatgtgacgggttctggcgtggtgagtagtatggtgcataacgtcaccgtgggtaaagccgatctctctactacgctgcaagcgagccagaaaaaactggatgaactgatcgaacagcactaaacccaggacaggaatccgcaatgaacaggctttttagtggtcgttccgatatgccctttgcgctgctgcttctcgcgcccagcttattactgctgggcggtctggtggcgtggccgatggtgagcaatatcgaaatcagttttttacgtctgccgctcaatcccaacatcgagagtacgtttgttggggtgagcaactatgtgcgtatcctctccgatcccggcttctggcatagcctgtggatgacggtctggtataccgcgctggtggtggcgggcagcaccgtgctcgggctggcggtggcgatgtttttcaaccgcgagttccgcctgcgcaaaaccgcgcgtagcctggtgatcctctcctacgtaacgccgtccattagcctggtgttcgcctggaaatacatgttcaacaacggctacggcattgttaactacctcggcgtcgatcttctgcatctctatgagcaggcaccgctgtggttcgataatccgggcagtagctttgtgctggtggtgctgttcgccatctggcgctacttcccgtatgcctttatcagctttctggcgattttgcagaccatcgacaaaagcctgtacgaagcggcagagatggatggcgctaatgcctggcaacggtttcgtatcgtcacgctgcccgcaattatgccggtcctggcgacggtggtgacactgcgcaccatctggatgttctacatgttcgcggatgtttatttgctgacgaccaaggtcgatattctcggtgtatatctctacaaaaccgcctttgcctttaatgatttaggaaaagcggcggcgatcagcgtggtgctcttcatcattattttcgctgtcattctgctgaccaggaaacgggtgaacctcaatggcaacaaataaacgcacactcagtcgcatcggtttttactgcgggctggcgctgtttctcatcatcacgctgtttccattttttgtgatgctgatgaccagcttcaagggcgcgaaagaggcgatcagtctgcatcctacgctgctgccgcagcagtggacgctggagcattacgtcgacatttttaacccgatgattttcccgtttgtcgactacttccgtaacagtctggtggtgtctgtggttagttccgtggtggcggtattcctcggcattcttggggcttacgcgctttcccgcctgcgctttaaaggtcggatgaccatcaacgccagcttttacacggtgtatatgttctctggcattttgctggtggtgccgcttttcaaaatcatcaccgcgcttggcatttacgacactgagatggcgctgatcatcaccatggtgacgcaaactctgcccaccgccgtgtttatgctgaaaagctacttcgacaccatccccgatgagatcgaagaagcggcgatgatggatggcctcaaccgtctgcaaattatcttccgcatcaccgtgccgttggcgatgtccgggctgatatccgtgttcgtctactgctttatggtggcgtggaacgactatctgtttgcgagcattttcctctccagcgccagcaatttcaccttaccggtgggcctgaacgcgctgttcagtacgccagattacatctggggacggatgatggcggccagtctggtgaccgcattgccggtggtgattatgtatgcgcttagcgaacgttttattaagagtggtttgaccgccggtggcgtgaagggctaaagcggccagtttctttacaaggagttttaaatgaaaaagttagtagccacagcaccgcgtgttgctgcgctggttgagtatgaagatcgggcgattttagctaatgaagtgaagatccgcgtgcgtttcggcgcaccgaaacacggaacggaagtggtcgacttccgcgccgccagcccgtttattgatgaagactttaacggcgaatggcagatgttcactccgcgtccggcagatgcgccgcgcggcattgagtttggcaaattccagcttggcaacatggtggttggcgacattatcgagtgcggcagcgacgttaccgactacgcggtgggcgacagcgtatgcggctacggcccgctctccgagacggtcatcattaacgcagtgaataactacaagctgcgcaaaatgccgcaaggcagctcctggaaaaacgccgtctgctacgacccggcgcagtttgccatgagcggcgtgcgcgatgccaacgtgcgcgtaggggattttgtggtggtggtagggcttggcgcaatcggtcaaattgccatccaactggctaaacgcgctggcgcttctgtggtgattggcgtcgatcctatcgcccatcgctgtgatattgcccgtcgccacggcgcggatttctgccttaaccccatcggcactgatgtaggtaaagagatcaaaacgctgaccggcaagcagggtgccgatgtgattatcgaaaccagcggctacgccgacgcgctgcaaagcgcgctccgcggtctggcttatggcggcaccatctcctatgtcgcgtttgccaagccgtttgccgaaggttttaacctcggacgcgaagcgcatttcaataacgccaaaattgtcttctctcgcgcgtgcagcgaaccgaacccggattatccgcgctggagccgcaagcgtattgaagaaacctgttgggaactgctgatgaacggttatctcaattgcgaagatttaatcgacccggtggtgacctttgccaatagcccggaaagctatatgcagtatgtcgaccagcatccggaacagagcatcaaaatgggcgttacgttttaattcaaaggaatgaaaaaaatgaaaatcggcacacagaatcaggcgttctttccggaaaacattctggagaaatttcgttatatcaaagagatgggcttcgatggttttgagattgacggcaaactgctggttaacaacatcgaagaagtcaaagcggcgatcaaagaaaccggtttaccggtgaccaccgcctgcggtggctatgacggatggattggcgactttatcgaagagcgtcgtcttaatggcttaaagcagatcgagcgcattctcgaagcgctggcagaagtgggcggtaaaggcatcgtcgttccggctgcgtggggcatgtttaccttccgcttaccgccgatgaccagcccgcgtagcctggacggcgaccgcaaaatggtgagtgattccctgcgcgtactggaacaggtcgccgcgcgtaccggaaccgtggtgtatctcgaaccgttaaaccgctatcaggatcatatgatcaacaccctcgccgatgcccgccgttacatcgtcgaaaacgatcttaaacatgtacagattatcggcgatttctatcacatgaatatcgaagaagataacctggcgcaggcgctgcatgacaaccgcgacctgctcggtcatgtgcatattgcggataaccatcgctaccagccgggcagcggcaccctggatttccacgcgctgtttgaacagctgcgcgcggataactatcagggctatgtagtgtacgaagggcgtatccgggcggaagatcctgcccaggcgtaccgtgatagcttggcctggttgcgtacctgctaagaggtctttgtgaaaagtgcaatgacaagctctccgctgcgggtcgcgataataggcgcaggccaggtggcggataaggttcatgctagctactactgcacccgcaacgatctggaactggtggctgtctgtgacagccgcctttcccaggcgcaggcgctggcagaaaaatacgggaatgcatccgtgtgggacgatccgcaggccatgctgctggcggtgaaacctgatgtggttagcgtctgcagtcctaaccgttttcattacgaacataccctgatggcactggaagcgggctgccatgtgatgtgcgaaaaaccgcccgccatgacgccagaacaggcgcgggaaatgtgcgataccgcgcgcaaactgggcaaggtgctggcctacgactttcaccatcgttttgcgctcgatacgcaacagctgcgtgaacaggtgaccaacggcgttttgggagagatttacgttaccaccgcccgcgccctgcgtcgctgcggcgttcccggctggggtgtctttaccaataaagaactgcagggtggtggcccgctgatcgacatcggcattcatatgctggatgctgcgatgtatgtgctgggctttccggcggtgaaaagcgtgaatgcgcatagctttcaaaagatcggcacgcaaaagagctgtggtcaatttggtgagtgggatccggcaacttacagcgtcgaagatagcctgtttggcaccattgaatttcataacggcggcattctgtggctggaaacgagttttgcactcaacatccgcgaacagagcattatgaacgtcagcttttgtggtgataaagctggtgcgacgctgtttccagcacatatctacaccgataacaacggtgaattaatgacgctgatgcaacgggaaatagcagacgacaaccgccatttgcgcagcatggaagcctttatcaatcacgtacagggcaagcccgtgatgatagccgacgccgagcaggggtacatcatccagcaactggtggcggcgttgtatcaatccgcagaaacagggacgcgtgtggaattatgaccaggccagtaacgttaagtgaaccccatttcagccagcataccctgaacaagtatgcaagcctgatggcgcaggggaacggctatcttgggcttcgcgccagccatgaagaagattacacgcgccagacgcgagggatgtatctggcggggctgtatcatcgggcgggaaaaggtgaaatcaacgaactggtgaacctgcctgatgtcgtggggatggagattgccataaatggtgaggttttcagcttatcccacgaagcctggcagcgtgagcttgactttgccagtggcgaattacgccgcaatgttgtctggcgtaccagcaacggcagtggttacaccatcgccagccgtcgctttgttagcgcagaccaactgccgctcattgcgctggaaatcactattacgccactggacgccgacgcgagtgtgctgattagtacaggcattgacgccacgcaaaccaatcacggtcgccaacatctcgacgaaacccaggtgcgggtgtttggtcagcatctgatgcaggggagctacaccacccaggatggacgcagtgatgtggccatcagctgttgctgtaaggtgagcggtgatgtgcagcaatgctataccgccaaagagcgccgtttactgcaacataccagtgcgcagcttcatgcaggcgagacaatgacgttgcaaaaactggtgtggatcgactggcgggatgacaggcaagctgctttagacgagtggggcagcgcgagccttcgccagcttgaaatgtgcgcgcagcagagttacgaccaacttcttgcagcaagtacagaaaactggcgtcaatggtggcagaaacgtcgtatcacggtaaatggcggcgaagcgcacgatcagcaagcgttagattatgcgctttatcatctgcgcatcatgacgcctgcccacgacgagcgcagcagcattgcggcaaaaggcttaaccggcgaaggctacaaaggccacgttttctgggatacagaagtatttttgttaccgtttcatctgtttagcgatccgacggttgcccgaagtttactgcgttatcgctggcacaacttgccaggcgcgcaggagaaagcgcgacgcaacggctggcagggcgcgctatttccgtgggaaagcgcgcgcagcggcgaagaagagacgccggaatttgccgccattaacattcgcaccgggctgcggcaaaaagtggccagcgcgcaggcggaacatcatctggtggccgatatcgcctgggcggttattcaatactggcagaccacgggggatgaaagtttcattgcgcatgaaggcatggcgctacttctggagacggcaaagttctggattagccgcgcggtgagagttaacgatcgtctggaaattcatgatgttattgggccagacgaatataccgaacatgtcaataataatgcatacaccagctatatggcccgctacaacgttcaacaggcgctgaatattgcccgccagttcggctgtagcgacgatgcgtttatccatcgcgccgaaatgttcctcaaagagctatggatgccagaaattcagcccgacggcgttttgccgcaggatgatagctttatggctaagccggcgattaatctggcgaaatacaaagcggcggcggggaagcaaaccatactgctggattatagtcgcgcagaagtgaacgagatgcagatcctcaaacaagctgatgtggtgatgctcaattacatgctgccggagcagttcagtgcggcaagctgtcttgccaatctgcaattttatgaaccgcgcactattcacgacagcagtttaagtaaagcaatccacggcattgttgccgcacgctgtggcctgctgacccaaagttatcagttctggcgcgaggggactgaaatcgatcttggtgctgatccgcatagttgtgatgatggtatccatgctgccgcaactggcgctatctggctgggggcgattcagggttttgccggggtgagcgtgcgtgacggtgaattgcatctcaatccggcgttacctgagcagtggcaacagttgtctttccctctgttctggcagggctgcgaattacaggtcactcttgacgcgcagcgtattgcgattcgaacttctgcgcccgttagtctgcgtttgaacggtcagcttataaccgtggctgaagaatctgttttctgtttgggtgattttattttgcccttcaatgggaccgctaccaaacatcaggaggatgaatgaaactgcaaggggtaattttcgatctggatggtgtaatcaccgataccgcgcatctgcatttccaggcgtggcagcagattgccgctgaaattggcatcagcattgatgcgcagtttaacgaatccctaaaagggatcagccgcgatgagtctctgcggcgcattctgcaacacgggggcaaagagggcgactttaacagccaggagagggcgcaactggcgtatcgcaaaaatctgctctatgtccacagtctacgcgagttgacggtcaacgctgttctacccggcattcgctctttgctggcagatctccgtgcacagcagatcagcgttgggctggcttctgtctccctgaatgcgccgacgattttagcggcgctggagctgcgcgagtttttcaccttctgcgcggatgcttcccaacttaaaaacagcaaaccggacccggaaatctttctcgccgcctgtgcagggctgggcgtgccgccgcaggcatgtatcggcattgaagatgcgcaggcgggcattgacgccattaacgccagcggtatgcgcagcgtggggatcggcgcgggcttaaccggggcgcaattactgttgcctagtacggaaagtctcacctggccgcggttaagcgccttctggcaaaacgtataacaaaggaatcaacatggctcagcttagcttacaacatattcaaaaaatctacgataaccaggtgcatgtggtgaaggacttcaacctggaaattgccgataaagagttcatcgtgtttgtcggcccgagcggctgcggtaagagcaccaccctgcgcatgattgccgggcttgaggagatcagcggcggcgatctgttgatcgacggcaaacgaatgaatgacgttccagccaaagcacgcaatatagcgatggtgttccagaactacgcgttgtatccgcatatgacggtttacgacaacatggcgtttggtctgaagatgcaaaaaatcgccaaagaggtgattgatgagcgggtgaactgggcggcgcaaattctcggcctgcgtgagtacctgaaacgtaagccgggggcgctttccggcgggcaacgtcagcgagtggcgcttgggcgggcgattgtacgcgaagcgggcgtgtttttaatggatgaaccgctctctaaccttgatgccaagctgcgcgtgcaaatgcgcgcagagatcagcaagctgcatcagaaactgaacaccaccatgatctacgtgacccacgatcagaccgaagcgatgaccatggcgacgcggattgtgattatgaaagacgggattgttcagcaagtaggtgcgccgaaaaccgtttataaccaacccgcgaatatgtttgtttccggatttattggaagtccagcgatgaattttattcgcggcacgatcgatggcgataaattcgttacggaaacgcttaaattaaccattcccgaagagaaattagcggttctgaaaacacaggaaagtttgcataagcccatcgtgatgggaatacgaccggaagatattcatccggacgcgcaagaggaaaataacatttccgccaaaattagcgtggcagaattaaccggtgcggaatttatgctctacaccacggttgggggcacgagttaaacggttgggggcacgagttagtggtccgtgctggtgcgttaaatgattatcatgcaggagaaaatatcactattcattttgatatgacgaaatgtcatttctttgatgcagaaacggaaatagcaattcgctaaatacagggggaaggcattcccccaggataatacaaggaacaataatgaaaaagttattaccctgtaccgcactggtgatgtgtgcgggaatggcctgcgcacaggccgaggaaaggaacgactggcactttaatatcggcgcgatgtacgaaatagaaaacgtcgagggttatggcgaagatatggatgggctggcggagcctagtgtctattttaatgccgccaacgggccgtggagaattgctctggcctattatcaggaagggccggtagattatagcgcgggtaaacgtggaacgtggtttgatcgcccggagctggaggtgcattatcagttcctcgaaaacgatgatttcagtttcggcctgaccggcggtttccgtaattatggttatcactacgttgatgaaccgggtaaagacacggcgaatatgcagcgctggaaaatcgcgccagactgggatgtgaaactgactgacgatttacgtttcaacggttggttgagcatgtataaatttgccaacgatctgaacactaccggttacgctgatacccgtgtcgaaacggaaacaggtctgcaatataccttcaacgaaacggttgccttgcgagtgaactattatctcgagcgcggcttcaatatggacgacagtcgcaataacggtgagttttccacgcaagaaattcgcgcctatttgccgctgacgctcggcaaccacagcgtgacgccgtatacgcgcattgggctggatcgctggagtaactgggactggcaggatgatattgaacgtgaaggccatgattttaaccgtgtaggtttattttacggttatgatttccagaacggactttccgttagcctggaatacgcgtttgagtggcaggatcacgacgaaggcgacagtgataaattccattatgcaggtgtcggcgtaaattacagcttctgataatgggctaaattgccggatgcggcgcgagtactttatccgatctataaatgtaggccggataagatgcgctagcatcgcatctggcattcaggcaaggtagctggtatttatttcagcgtcatatgcgtggcaacggtaatattctgtggactcggttttccagaaattaagcggaataataactcgcagctttgttgacctaactcctgcgtcggaacatcgatgccgcccggtgcaggcgttaaaataaaactcagcgtttcattgctataacccaccaccgctaactgctgcggaatagcaatatttttctctgctgccgcacgataaatgctcattaatttcaggctgtcagtggcaaacaccgcctcaggcaacggactctggcttaataattgccgtgctgcttttaatgcagtttcatgggtataaccgccatcaacaatccattcatcacgcactgcaatattatgcgcagccaggctctgcttataaccattaacgcgatcaacgctaacatggacatcaagcggagcatgcaggcaggcaatattttgatgcccactttcaattaatgcatcggtcaacgcaatgctgtcgccaaaattatcggtatcgacagaataaacatgggcatattgaccttcaactttgccaatcaccaccaccggaatatcatatttatcgagttgggcaaaaaaactctcatccgctgggctactgagcataataatgcctttaatcattttctgcttaattttgctttcgcatttttgcagatcttctgccggattgtggctcgtttgtaatatcacgtcgaaaccttcttcttcagctttggcggtgatggcatgcaaaacttcagagaaaaacggattacccgccgtagttttggtgctacgggtagaaatcaccataatggcatcaaaaccgctagaggtcagcgcgcgggccagcttgtttggctgatactgtaattcttcaatggcccgtaacactttttcgcgcgcttccggggagatattagtttgcttattcagcacgcgacttacggtggatttacttacgcctgcaaccctggcaatatcataaatagtaggggacataggtcaggaactccgtccgaacgtgaatgctgcacatcttatggagttcgccggtcgatgacaacacgggcagttgataatcaatggcctggcccccacattcatatccttacgaatgattttttttctggtcttcagagcagcacaggacagcaatgaagcgacttaaaaatgaactcaatgcgctggtgaatcggggtgtcgacagacatctgcgcctcgctgtaaccggacttagccgcagcggcaaaacagcgtttatcaccgcgatggttaatcagttgcttaatattcacgccggagcacgtttgccgctgttaagtgcggtgcgtgaagagcgcctgctgggcgtgaaacgcattccccagcgtgactttggcattccgcgcttcacctatgacgaagggctggcgcagttatatggcgatccacccgcctggccaacgccaacgcgcggcgtcagtgaaatccgcctggcgctacgttttaaaagcaatgatagcctgctacgccactttaaggatacctccacgctgtatctggaaattgtggattatcccggcgaatggttgctcgacctgccgatgctggcgcaggactatttaagctggagccgccagatgacgggcttactcaatggtcagcgcggagaatggagcgcgaaatggcgaatgatgagcgaagggctggacccgctagcgcctgccgacgaaaaccggctggcggacattgccgccgcgtggaccgattatctccaccactgtaaagagcaggggctgcactttattcagcctgggcgctttgtcttgccgggagatatggcaggtgcgcccgcgctgcaattcttcccgtggccggatgtcgatacctggggcgagtccaaactggcgcaggccgataagcataccaatgccggaatgctgcgcgagcgctttaattattactgcgagaaggtggtgaaggggttctataagaatcattttctgcgctttgaccgccagattgtgctggtggattgcctgcaacctctcaacagtgggccacaggcatttaatgatatgcgtctggcactgacgcagctgatgcaaagttttcactacgggcagcgtaccctgttccggcgtttgtttagcccggttatcgataagctattgtttgctgccactaaagcggaccatgtgaccatcgatcagcacgctaatatggttagtttactgcaacaactgattcaggatgcctggcaaaatgcggcgttcgaagggatcagcatggactgcctggggctggcgagtgttcaggcgaccaccagcggcattattgatgttaacggtgagaaaatcccggcgctgcgtggtaatcgacttagcgatggcgcaccgctcactgtttatcctggcgaagttcccgcacgtttgcctggtcaggcgttctgggataagcaaggcttccagtttgaggcatttcgtccgcaggtgatggatgtcgacaaaccactaccgcatattcgtcttgatgctgcgctggaatttttaataggagataaattgcgatgaccgaaccgttaaaaccacgtattgatttcgacggtcctctggaggtcgatcagaatcctaaattcagggcgcagcagacctttgacgaaaatcaggcgcaaaattttgccccggccacgctcgacgaagcgcaggaagaagaggggcaagtcgaagcggtaatggacgcagcgttacgtccgaaacgcagcctgtggcgcaaaatggtgatgggagggctggctctgtttggcgcaagcgttgtcgggcagggtgtacagtggacaatgaatgcctggcaaacccaggactgggtggcgctgggtggatgtgccgctggggcattgattatcggcgctggcgtaggttctgtggtaacagagtggcggcgcttatggcgcttgcgacagcgcgcccatgaacgcgacgaagcgcgtgatttattgcatagccacggcacgggcaaaggccgcgcattttgcgaaaaactggcgcagcaggcgggtattgatcagagccatccggcgctgcaacgctggtatgccagtatccatgaaacgcaaaacgaccgtgaagtggtcagcctgtatgcgcatttggtccagccagttttagatgcccaggcgcggcgcgaaatcagccgtagcgcggcggaaagtacgttgatgattgcggtcagcccgctggcgttggtcgatatggcgtttatcgcctggcgcaatctgcgtttaattaatcgcatcgccacgctgtatggcattgaactggggtattacagccgtttgcgtctgtttaagctggtattgctgaatatcgcttttgccggagccagcgaactggtgcgcgaagtggggatggactggatgagccaagatctcgctgctcgtttgtctacccgcgcagctcaggggattggtgcaggacttctgacggcacgactcgggattaaagctatggagctttgccgcccgctgccgtggattgacgatgacaaacctcgcctcggggatttccgtcgtcagcttatcggtcaggtgaaagaaacgctgcaaaaaggcaaaacgcccagcgaaaaataatgcaatatcgggtgctgaccggatatctttacgccgaagtgcccgtttttccgtctttgtgtcaatgattgttgacagaaaccttcctgctatccaaatagtgtcatatcatcatattaattgttcttttttcaggtgaaggttcccatgcgtctggaagtcttttgtgaagaccgactcggtctgacccgcgaattactcgatctactcgtgctaagaggcattgatttacgcggtattgagattgatcccattgggcgaatctacctcaattttgctgaactggagtttgagagtttcagcagtctgatggccgaaatacgccgtattgcgggtgttaccgatgtgcgtactgtcccgtggatgccttccgaacgtgagcatctggcgttgagcgcgttactggaggcgttgcctgaacctgtgctctctgtcgatatgaaaagcaaagtggatatggcgaacccggcgagctgtcagctttttgggcaaaaattggatcgcctgcgcaaccataccgccgcacaattgattaacggctttaattttttacgttggctggaaagcgaaccgcaagatagccataacgagcatgtcgttattaatgggcagaatttcctgatggagattacgcctgtttatcttcaggatgaaaatgatcaacacgtcctgaccggtgcggtggtgatgttgcgaagtacgattcgtatgggccgccagttgcaaaatgtcgccgcccaggacgtcagcgccttcagtcaaattgtcgccgtcagcccgaaaatgaagcatgttgtcgaacaggcgcagaaactggcgatgctaagcgcgccgctgctgattacgggtgacacaggtacaggtaaagatctctttgcctacgcctgccatcaggcaagccccagagcgggcaaaccttacctggcgctgaactgtgcgtctataccggaagatgcggtcgagagtgaactgtttggtcatgctccggaagggaagaaaggattctttgagcaggcgaacggtggtagcgtgctgttggatgaaataggggaaatgagtccacggatgcaggcgaaattactgcgtttccttaatgatggcactttccgtcgggttggcgaagaccatgaggtgcatgtcgatgtgcgggtgatttgcgctacgcagaagaatctggtcgaactggtgcaaaaaggcatgttccgtgaagatctctattatcgtctgaacgtgttgacgctcaatctgccgccgctacgtgactgtccgcaggacatcatgccgttaactgagctgttcgtcgcccgctttgccgacgagcagggcgtgccgcgtccgaaactggccgctgacctgaatactgtacttacgcgttatgcgtggccgggaaatgtgcggcagttaaagaacgctatctatcgcgcactgacacaactggacggttatgagctgcgtccacaggatattttgttgccggattatgacgccgcaacggtagccgtgggcgaagatgcgatggaaggtagcctggacgaaatcaccagccgttttgaacgcagcgtattaacccagctttatcgcaattatcccagcacgcgcaaactggcaaaacgtctcggcgttagtcataccgcgattgccaataagttgcgggaatatggtctgagtcagaagaagaacgaagagtaagcgcgaatatgcctgatggtgcaacaccatcaggcatattaaattatgctttcagtacagccagagctgcttcgtaatccggctcggtggtgatttcatccaccagctggctgaaaatcacattgtcattttcgtcaataaccacaacggcacgcgctgccagacctttcagtgggccatcagcaattgccacaccgtaagcttgcagaaattcagcgttacggaaagtggagagggtgataacgttgttcagaccttctgcgccgcagaaacgagactgggcgaacggcagatcggcagagatacacagcacaacggtgttgtcgatctcagttgccagttggttaaacttacgtacacttgcggcgcaaacaccggtatcaatactcgggaaaatgttcagcactttgcgtttacccgcaaactgaccgagggtgacgtcagacagatcttttgccacgagagtaaaagtctgcgctttgctacccgcctgcgggatggaattggcgactgtaaccgggttgccctggaaatgaacggtttgactcatgattatctttcctgtttacatatagttaacgtcacacctagtttatgctaactgtcaataacacagcaaacgctattacagggtctccttacaacaactgtcaacgcagtttgtaattaaaagattaacccatatctggtgaatgaaacagtgatgaaccttctgccagatcaataaatcagaaaaatttaatgatatgacagaaggatagtgagttatgcggaaaaatcaggcaacgttacgcgtatgaccagcaagctgggccagcgcatcgttattttcgatggtgatgtatttacctttgactgccagcatgccgcttttctggaagcgacccagcagacggctgatggtttctaccgtcaggcccagatagttaccgatatcgccacgagtcatcgtcaggcggaattcacgaggggagaagccgcgttgggcaaaacgacgggacaggttgtagatgaatgcagccagacgttcctcggcatttttcttgctcaacagcaggatcatgtcctgatcgcctttgatttcaccgctcatcagacgcatcatctgctgacgcagattcggcattttaccggacaaatcgtccagcgtttcgaacgggatttcacataccatgctggtttccagcgcctgcgcgaagctcgggtgatggccgctgccgatggcgtcaaatcccaccaggtcgcctgctaaatggaaaccagtgatttgctcgtcgccttgctcagtgatggtataacttttaatcgtaccggagcggatggcataaaggcttttaagttcatcaccagccttaaacagcgtctggcctttctgaataggcttcttccgctcaatgatattatcaagctgatcaagctcatgttcgttgagtgtgaacgggatgcaaagctggctgatgctgcaatcctggcaatggatagcacaaccgccagactgaatgcgccgtataattcgcttttccgggatcataggtctgctcaagccgtaattgatatttgtcaattttaacatctttttagggagcaagtaagtctaagcaaaccttaacagcagagaattccgatattagatgtaaatatatgtctatctatttgaaaacccttaagttgttaagggtaactttacataaaagtgtgaacaagctggcacaaattgtttaatgtttacagcaaaagataaccttcatggcgcaataaccactcttttcgctgaactccgcctgcatatccggtcatggtgccgtttcggccaataacccgatggcaaggtacgacgatgctgatgggattgcttccgtttgccgcaccaacggcacgcgccgcgccaggacggcccaattgctcagccagttggccgtaatgcattacctgcccgcaggggatagtgcgtagtgttttccagacttcgcgctgaaatggcgtcccccccgtagcagtgggaagcgtatcaataatgctaagattaccggcaaaatattcacgaagcttgtcgcttaaaccgcctggattggtggcagaaatgcgctcatagccttctttgcgataatggatgtccagcagctgcaccatgcgttcgctgtactcttcccattcaaccgcccgcaggcgaaattgctcatcgcaaatcacccacagtggacccagtggcgtggcaattttttcttcaagtaatctcagcatccgttctctcttaagacaaacgtgggtaaatacccggacctatcggcagaccgacaagataccacgccagcacatcgcagccatactatgcagaaacaatgctgtcgatggctgcttttgcgtcagactgtgctttcgctgccatttccggaccgtatgcgatcccttcggcgaagacaaatttcacatcggtaatgccgataaagccgaggaacgtggacagatacggcgtcaccaggtccgttggtccatctttgtggatcccgccgcggctggtaataacgatggcttttttacccgttaccagaccttccggaccgttctcggtatagcggaaagtaacgcctgcgcgggcaaccaggtcaaaatagtttttcaactgagtcgagatgttgaagttatacatcggtgccgcaataacgataacgtcgtgggctttcagctcggcaatcaactcatcggaaagtgccagagcttcctgctgacgcggagtcagcggcgcatcgctcggacgcagagcgccaaccagttcgccatccagtaccggaatcggatttgcagccaggtcgcgaacggtgatttcatcagcggagtgcttttcgcgccattgttcaacaaaataatcggacaactgattagactgagagtaccctgccaggatgctggatttaagaactaataccttgctcatggtgtttccttatagatgtttgaatgggcgatgccccgttgcttgttgacactttattcacaatcctgccacagagatagcgcaataaatcgaagcctatgttcgaatttattgaacaacgcatagaaagccgcgatgtggtactctatatctatcatttaaaagaaaattaatcaggcagactactgcccactaacgttatgacagaacaacaaaaattgacctttacggccttgcagcagcggctggattcgctgatgctgcgtgacagactgcgtttttctcgccgtctgcacggcgtgaagaaggttaaaaatcctgatgcacaacaggccattttccaggagatggcgaaagagattgaccaggcggcagggaaagtcctgctgcgtgaagcggcacgaccggaaattacttatcctgacaatttaccggttagtcagaaaaaacaggacattctcgaagcgattcgtgatcaccaggtggtgatcgtcgccggggaaacgggttctggtaaaacgactcagttaccgaaaatctgtatggagctggggcgcgggattaaaggactgatcggccatacccagccgcgtcgtctggcggcaagaacagtggcgaaccgtattgcggaagagctgaaaacggagccgggcggttgcatcggttacaaagtgcgtttcagcgatcacgtaagtgataacacgatggtcaagctgatgaccgacggtatcctgctggcggagatccagcaagaccgcctgctgatgcagtacgacactatcattattgacgaagcgcacgaacgcagcctgaatatcgattttttgctcggctatttgaaagagttgctgccgcggcgtcctgacctaaaaatcattatcacttccgcgactatcgacccggaacgctttagccgccactttaataatgcgccgattattgaagtctccggtcggacctatccggtggaagtgcgctatcgcccgattgttgaagaagccgatgacaccgagcgcgatcagttgcaggcgatttttgacgccgtagacgaactgagtcaggaaagccatggcgacattctgatctttatgagcggcgagcgggaaatccgcgataccgccgatgcgctgaacaagctgaacttacgccataccgaaatcttgccgctttatgcgcggcttagcaacagcgaacaaaatagggtattccagagccacagcggacggcgcattgtgctggcgaccaacgtcgcggaaacgagcctgaccgtaccggggattaaatacgttatcgaccccggtacagcgcgtatcagccgctacagctatcgcaccaaagtgcagcgtttgccgattgagccgatttcccaggcgtctgccaatcagcgtaaaggccgctgtggtcgtgtgtccgaagggatctgtattcgtctctattccgaagacgatttcctcagccgcccggagtttaccgatccggagattctgcgtaccaacctggccagcgttattttgcagatgaccgcgctggggctgggcgatatcgctgcgttcccgtttgtcgaagcaccggataaacgcaatatccaggatggcgtgcgtctgctcgaagagctgggcgcgatcaccactgatgaacaggccagcgcctataaactgacgccgctcggtcgccagctcagccagttgcctgtcgacccacgtctggcgcgtatggtgctggaagcgcaaaaacatggctgcgtgcgtgaggcgatgattatcacgtccgcgctctccattcaggatccgcgcgaacgtccgatggacaaacagcaggcaagcgacgaaaaacatcgtcgcttccacgacaaagagtctgactttctcgcgtttgtgaatctgtggaattatcttggcgagcagcaaaaggcgctttcttccaacgccttccgtcgcctgtgtcgtaccgattatctcaactatctgcgcgtgcgcgaatggcaggatatctacacccagttgcgtcaggtggtgaaagaacttggcattccggttaacagcgaaccggcggagtatcgcgaaattcacattgcgttgctgaccggtttactttcccatatcggcatgaaagatgccgataaacaagaatataccggcgcacgtaacgcgcgtttctccatcttccccggttctggtttattcaaaaaaccgcctaaatgggtaatggtggcggaactggtagaaaccagccgcctgtgggggcgcattgctgcgcgtatcgacccggaatgggtggagccagttgctcagcatttgattaaacgcacctacagcgaaccgcactgggaacgggcgcagggcgcggtgatggcaacggaaaaagtcactgtttatggtttgccgattgttgccgcgcgcaaggtcaactacagccagatcgatccggcgttatgtcgtgaactctttattcgccacgcgctggtggaaggtgactggcagacgcgtcacgcattcttccgtgaaaacctgaaactacgggcggaagtagaagagctggaacacaaaagtcgtcgccgcgatattctggttgatgacgaaacgttgtttgagttctacgaccagcgcatcagccacgatgtaatctccgctcgccacttcgacagctggtggaaaaaagtcagccgcgaaacgcctgatttgctcaactttgaaaaaagcatgttgatcaaagagggcgcagaaaaaatcagcaagctggattacccgaacttctggcatcagggcaatctcaagctgcgtttgagctatcagtttgagcccggcgcggatgctgacggtgtgaccgtacatattccgctgccgttacttaaccaggttgaggaaagcgggtttgaatggcagatccccggtctgcgccgcgaactggtgattgctctgattaaaagcttgccgaaaccggtacgccgtaattttgtacccgcgccaaactatgccgaagcgtttttaggccgcgtcaaaccgctggagttaccgttgctcgacagccttgagcgcgagttacggcggatgaccggcgttaccgttgaccgcgaagactggcactgggatcaggtgcccgatcacctgaaaattaccttccgcgtggtggatgacaaaaacaagaagctaaaagaagggcgcagcctacaagatctgaaagatgcgctgaaaggcaaagtgcaggaaacgctatctgcggtggcggatgacggtatcgagcagagcggcttacatatctggagttttggtcagctgccggaaagctacgaacagaagcgtggcaactacaaagtgaaggcgtggccggcgctggtggatgagcgcgacagtgtggcgatcaaactgtttgataacccgctggagcaaaagcaggcaatgtggaacggtcttcgccgtctactgctgctgaatattccaagcccaatcaaatatttacatgaaaagttaccgaacaaagccaagctgggactgtactttaacccgtatggcaaagtgctggagctgatcgacgactgtatctcctgcggtgtggataaattgatcgacgccaatggtggcccggtctggacggaagaaggctttgctgcgctgcatgaaaaagtgcgtgccgaactgaacgacacggtggtggatattgcgaagcaggtcgagcaaatccttacggcagtgttcaatatcaacaaacgtctgaaagggcgggtggatatgaccatggcgctggggctttctgacattaaagcgcagatgggcgggttggtatatcgcggttttgtcactggtaacggcttcaaacggctgggcgacacgctgcgatatttgcaggcgattgaaaaacggctggaaaaactggcggttgatccacatcgcgaccgtgcgcagatgctgaaagtcgaaaacgtccagcaggcgtggcagcaatggatcaacaaactgccgcccgcacgtcgtgaggatgaagacgtgaaagagatccgttggatgatagaagagttgcgcgttagttacttcgctcaacaacttggtacgccttatccgattagtgataagcgtattttgcaggcgatggagcagattagcggttaaccctgctatttgcctgataaagaaaaaacccggtaagcatttagcgccgggttttttattaattctaaaacggtaagggtaaaaattcaggaattcagaaaaatacaattctctgctgcaagatgaataatgtttatctacagcatttccttaaaagatatgtcaggcttgcggagtggcggttaaggacatacgatttcctcctttcagagtgctccgcttctcactattatctcacgcagtattcttaagggaacgataaggaggaaccatgaacattaccccgtttccgacgcttagcccggcaactatagatgccataaatgttatcggacagtggctggcgcaggatgatttctccggtgaggtgccgtatcaggccgattgcgtgatccttgcaggcaatgcggttatgccgactatcgatgcggcatgtaagattgcccgcgatcagcaaattcctttactgattagtggtggtatcggtcacagcacaacttttttgtatagcgccatcgcacagcatccgcactacaacactatccgcaccactggcagagcagaagcgaccatcctggcggatatcgctcatcagttctggcacattccgcatgaaaaaatctggattgaagaccagagtacaaactgcggtgaaaacgcacgctttagcatcgcgctattgaatcaggccgtagaacgagttcatacggctatcgttgttcaggaccccaccatgcagcggcgcacgatggcgacgttccgccgtatgactggggacaatcccgatgcaccacgctggttaagttatcccggattcgttcctcagttaggaaataacgcagacagtgtaatctttattaatcagttacaaggattatggccagttgagcgttatctcagtctactcactggcgagctgccgcgtttacgcgatgatagcgatggctacggtccccgcgggcgagattttatcgttcacgttgattttccggcagaagtcatccatgcatggcaaacgctgaaacatgatgcggtgctcatcgaggcgatggaaagtcgcagcttacgttaaaaattgcccgtttgtgaaccacttgtttgcaaacgggcatgactcctgacttttatttctgccttttattccttttacacttgtttttatgaagcccttcacagaattgtcctttcacgattccgtctctctgatgattgatgttaattaacaatgtattcaccgaaaacaaacatataaatcacaggagtcgcccatgagtgtacccgttcaacatcctatgtatatcgatggacagtttgttacctggcgtggagacgcatggattgatgtggtaaaccctgctacagaggctgtcatttcccgcatacccgatggtcaggccgaggatgcccgtaaggcaatcgatgcagcagaacgtgcacaaccagaatgggaagcgttgcctgctattgaacgcgccagttggttgcgcaaaatctccgccgggatccgcgaacgcgccagtgaaatcagtgcgctgattgttgaagaagggggcaagatccagcagctggctgaagtcgaagtggcttttactgccgactatatcgattacatggcggagtgggcacggcgttacgagggcgagattattcaaagcgatcgtccaggagaaaatattcttttgtttaaacgtgcgcttggtgtgactaccggcattctgccgtggaacttcccgttcttcctcattgcccgcaaaatggctcccgctcttttgaccggtaataccatcgtcattaaacctagtgaatttacgccaaacaatgcgattgcattcgccaaaatcgtcgatgaaataggccttccgcgcggcgtgtttaaccttgtactggggcgtggtgaaaccgttgggcaagaactggcgggtaacccaaaggtcgcaatggtcagtatgacaggcagcgtctctgcaggtgagaagatcatggcgactgcggcgaaaaacatcaccaaagtgtgtctggaattggggggtaaagcaccagctatcgtaatggacgatgccgatcttgaactggcagtcaaagccatcgttgatagtcgcgtcattaatagtgggcaagtgtgtaactgtgcagaacgtgtttatgtacagaaaggcatttatgatcagttcgtcaatcggctgggtgaagcgatgcaggcggttcaatttggtaaccccgctgaacgcaacgacattgcgatggggccgttgattaacgccgcggcgctggaaagggtcgagcaaaaagtggcgcgcgcagtagaagaaggggcgagagtggcgttcggtggcaaagcggtagaggggaaaggatattattatccgccgacattgctgctggatgttcgccaggaaatgagcattatgcatgaggaaacctttggcccggtgctgccagttgtcgcatttgacacgctggaagatgctatcagtatggctaatgacagtgattacggcctgaccagtagtatctatacccaaaatctgaacgtcgcgatgaaagccattaaagggctgaagtttggtgaaacttacatcaaccgtgaaaacttcgaagctatgcaaggcttccacgccggatggcgtaaatccggtattggcggcgcagatggtaaacatggcttgcatgaatatctgcagacccaggtggtttatttacagtcttaatgagtgaaagaggcggaggttttttcctccgcctgtgcgcgtcagagtttagcgaatttttcgagggtgcgaataagctgtgtgacgaagccatattcgttatcgtaccaggcgaccgttttcaccagttgtaaatcgcccacggcggtaatttccgtttgcgtggcatcaaacaccgaaccgaaatggctgccaatgatatcggaagagactatttcttcatcggtataaccaaatgactcgttattggtggttgcttgtttaagtgcgttattcacctcttcggcagtcacttttttccgagaatcgataccagttcagtgaccgaacctgttttcaccggcacgcgttgcgcatgacctttcagtttgccgctcagttccgggatcaccagaccaatggcttttgccgcccccgtagtgtggggaatgatattttctgccgctgcgcgtgaagcacgtaaatctttaccacgcgggccatccaccagtgactgggtgccagtataggcatgaatggtcgtcatcgtgccgacttctatcccgaaactgtcatgcaaggctttggccatcggcgcaagacagttagtggtgcatgacgccacggaaacaatggtgtcgttgccatccagagtgtcgtcattgacgttataaacgatagttttcatttcaccggcaggggcggaaatcaacaccttcttcgcaccagcatcaagatgcgcctgcgatttctcggcggaggtataaaagccagtacattcgacaatgatttctgcacctttcgctttccacggaatatttttagcctctttttcggcgtaaaccgcgatacttttcccatcaacgataagtgaatcttccgtaaaatcaacgctccaggggaatggtccgtagtttgaatcatgtttcagcaggtaggcgagaatttatggggaagtgagatcattaatagcgacaacgtctatgttgcttttgacttcaagtaatcgacccaacaccagtcgaccgatacgaccaaaaccgttaataccaactttactcatggttttctcctgtcaggaacgttcggatgaaaattgatcctttccaagcttagaccaggatggcgggatgggcaatctccattctcacagtgaaacgtaacgtactgaaaacgggtgaacaatatttaatgaaattttgagaaaagcccgttatgttaacggaaaattatgttaaagcaggaaatgttatggaaaataaatatagtaggttacaaatcagcattcactggctggtctttttactggttatcgcagcgtattgcgcaatggagtttcgtggtttcttcccacgtagcgatcggccactcatcaacatgattcatgtttcctgtggcatcagtattctcgtgctgatggtcgttcgtcttttgttaaggctgaaatacccaaccccgccgattatacctaagccaaaaccgatgatgacgggactggcgcatttgggacatttggtgatttatctcctgtttattgcgctgccagtgattggtttggtgatgatgtataaccggggcaacccgtggtttgcgtttggtttgacgatgccttacgctagtgaggccaatttcgaacgggtagatagcttaaagagctggcatgaaacgctggcgaatctgggatattttgtcatcgggttgcacgctgcggctgcactggcacaccactatttctggaaggacaacacacttctacgcatgatgccgcgtaaacgttcctgaaggatatttaaagaaaacgcctgtactaaaaccgacccgtggtacaggcgaagaatacgggtctacatcggaagcgcctattatatttatttgtatgataaataaaaccataatccttgcccatacgtccatctggcttatttttaatcaattcacccgatctttgatctcatcaacggtatcaaaataaaccagcgtataacgttcaaatcgaacataagattcgataaaccatggaggttatatgaaaaaactggcacttattttgtttatgggaacgcttgtttccttttatgccgatgccgggcgcaaaccctgttctggtagcaaaggggggatcagtcactgtacggcaggcggcaaatttgtctgtaatgatggttctattagtgcaagcaaaaaaacatgcactaactgaagtgtaaaaggggtgccatgagaaaatgaatctgctagtcaaatgcgcggggaaaatccccgcgcttgcccttacctggacgtgcaggccatgagcgcagcaacctccttatcaccgtcccggaaccgcagttcgtagagcgtttgtcgggtcaggagtgtgaatgtcagaatcgtaatgcagataatgagcagacacaccaccagagggttgtgcttcatagcctttctccttgccggatggcgggtaagaggctaagatctgaattgctaggttcattcgttggcctcggttgatagaaatatcggtcggggccttcgtctttctgattcccggttagcctgaaaacagaaagtctcaggcacccgcaggcatcctatgaggtttccttagggacgaaaataatcacttcacgaaattgcgtgctgttttccagaatttttcgtcattcgggttagccagtttagccattcgttactctcttcattccaatagcattaattttctatgcaataattgttgtaaaaatgtgacgcaaagaggtttttggtcataagtaattaccgtcaagtgccgatgactttctatcaggagtaaacctggacgagagacaacggtaatgaatacaactcccagtcagcgattaggttttttgcatcacatcaggttggttccgttatttgcctgcattctaggcggtatcttagttctattcgcattaagtagtgccctggctggctatttcctctggcaggccgatcgcgatcagcgtgatgttactgcggagattgagattcggaccgggttagcgaacagtagtgattttttgcgtagtgcccggatcaatatgattcaggccggggctgcgagtcgtattgcggaaatggaagcaatgaagcgaaatattgcgcaagccgaaagcgagattaaacagagccagcaaggttatcgtgcttatcagaatcgaccggtgaaaacacctgctgatgaagccctcgacactgaattaaatcaacgctttcaggcttatatcacgggtatgcaacctatgttgaaatatgccaaaaatggcatgtttgaagcgattatcaatcatgaaagtgagcagatccgaccgctggataatgcttataccgatattttgaacaaagccgttaagatacgtagcaccagagccaaccaactggcggaactggcccatcagcgcacccgcctgggtgggatgttcatgattggcgcgtttgtgcttgccctggtcatgacgctgataacatttatggtgctacgtcggatcgtcattcgtccactgcaacatgccgcacaacggattgaaaaaatcgccagtggcgatctgacgatgaatgatgaaccggcgggtcgtaatgaaatcggtcgcttaagtcgtcatttacagcaaatgcagcatagtctggggatgacagtagggactgttcgacagggcgcggaagagatttatcgtggcaccagcgaaattagtgctggcaatgcggacctgagttctcgcaccgaagaacaagcggcggctatcgaacaaactgccgccagcatggagcaactcactgcgacggtgaaacagaatgcggataacgcgcatcatgccagcaaactggcgcaagaggcttctattaaagccagcgatggcgggcagacggtttccggtgtagtaaaaacgatgggcgctatctccacgagtagcaagaaaatttctgagatcaccgccgtcatcaacagtattgctttccagacgaatattctggcactgaatgctgccgttgaagccgcgcgagcgggtgagcaagggcgtggatttgccgttgtcgccagcgaagtacggacactcgcaagtcgcagcgctcaggcggcgaaagagattgaaggcttgatcagtgaaagtgtcaggttaattgacctggggagcgatgaggtggcaacggccgggaaaaccatgagcactattgttgatgccgtcgcgagtgtcacacatatcatgcaggaaatcgccgccgccagcgatgaacaaagtagaggcataacgcaggttagccaggcgatttctgaaatggataaggtgacgcaacagaatgcttctctggtagaagaggccagtgcggcggcggtgtcccttgaagaacaggcggcacgattaactgaggcggtggatgtattccgtctgcacaaacattctgtgagcgcagaacctcgcggagcgggtgaaccagttagtttcgctacggtgtgaaaatgttcaaggagggatcgacagatcccttcacctttcagaacggcatactttttcgaatagcgttaatcatcaactggcaaccagaagagaacgtcgcatctacgcgggtcagtattccaatcggttcgcctgcaccatgtcccggaacaggcagggccaccagcgtggcatgacgcaggtcgtcttttacagcgccagaagggacaaaccacacgtaatcgtattcaaccgtaagttgacgagataggctagcagacagcgtttcgatacaaccgctaggaattttacagccctggctctgcactaatgcatcactatgctggcgtggcgcagtgccttctggacttacaacgaccggccattccagcacccggcttagcgttacgttctcctgaagtagcgggtgattagggcggacaaccagcttcaagctttcaagaaacagcagttcgtaattaagcccggtcatcagttcaggatcactcatccgaccaatgccgatatcgatttccccggtttttaaacccgccagaatcatagggttactcattgtcgcaacttgcaaggtcgtctctttttgttgctgatgaaactgacctataacgctaggtaatatccccagtgccgcagtaggtagtgcaccaaccctgacgacatcattattaagaccttctttacgatgaaggctccgtccggcagtgttgatggcgtcaagaactctgactgcatgcgttaaaaattgttcgccgggtaaggtaagttgcgccccctgacgaccacgctcaaacaagcgagcgccagtcagctgctccagttcattcaatgtcttagagagcgcaggttgactcaaattaagggtttcagccgcgcgccccaaagttccttgttgtgcgacagctacgaatgtatgaaggtggcgcaaacggatgcgctgactaaacagactatttttttccataagcgatgttaaaaacgaagcggtgtcgctgacaagtgaagttgtttgattatgataacttgattgcaaaatattattaacaattaaagcaattatgttacagcaaaatggataatattgatgttttcgcggcgagatcacagtttgtaaattcttcccgcaagagtgaatgcggttacctacactccagattactgaccactggaggcagacactatggcgaacagcatcacggcggatgagattcgggaacagtttagccaggcaatgagtgccatgtaccagcaagaagttccgcaatatggcacgctgctggaactggtagctgatgtgaatctggctgtgctggaaaacaatcctcaactgcacgaaaaaatggtaaatgcagacgagctggcgcgactgaatgttgaacgtcatggggcgattcgcgttgggactgcacaagagcttgctactcttcggcggatgtttgccattatggggatgtacccggtgagctattacgatctcagccaggcaggggtgccggtacatagcacagcatttcggcccattgatgatgcttctctggcgcgtaatcccttccgcgtttttacctccttactccgccttgagcttatcgagaacgaaattttgcgccagaaagcggcggagattctgcgtcagcgcgatatcttcaccccacgttgtcgacaactgttagaggaatatgagcagcagggcggctttaacgaaacacaggcacaggagtttgtgcaggaagccctggaaacgtttcgctggcaccagagtgcaacggtagatgaagaaacctatcgcgcattgcacaacgaacatcggttgattgctgatgtggtctgttttcctggatgccatatcaaccacctgacgccacgtacgctggatattgaccgggtgcagagcatgatgcctgaatgcggaattgaacccaaaattctcatcgaggggccgccgcgccgcgaggtaccgattttactacgccagaccagctttaaagcactggaagagacggtgttgtttgcggggcagaaacagggcacgcataccgcgcgctttggtgaaattgagcagcgtggcgtggcattaacgccgaaagggcgacaactgtatgatgatcttctgcgtaacgctggaaccgggcaggataatctcactcaccaaatgcatttacaggaaaccttccgcacttttcctgacagtgagtttttaatgcgtcagcaagggttggcatggttccggtaccgtctgacgcctagcggtgaggcgcatcgtcaggcgattcatcctggagacgatccacagcccttaattgaacgtggttgggtagtggcgcaacccatcacctatgaagatttcttgcccgttagcgcggcggggatcttccagagtaatctgggtaatgaaacgcagacacgcagtcacggtaatgccagtcgcgaagcatttgagcaggcgttgggttgtccggttttggatgagttccagctttaccaggaagcggaagaacgcagtaaacgtcgctgtggtttgctttaaaatctgaccatccgcctttgcaaaaatttgcctgattttacaaacgaatcaggctcatcccatcgacataaaaaaaatgccgatttatgcatattctctcagttcaacaattggattattaataaatattgtctagagtgagcggtcataaataagcactttcttgccgctgaaaacgaccagcgcgggaccattcacaacaccagaaggactcactttcaggtatggatcgtagacgatttattaaaggttcaatggctatggccgccgtgtgcggtaccagcggcattgcttctcttttttctcaggcggcattcgcggcagattctgatattgccgacgggcaaacccagcgttttgacttctccattctacagagtatggcgcacgacttagcgcaaacagcgtggcgtggtgcgcctcgtccgttacctgacacgctggcgacaatgacgccgcaggcttataacagtattcaatacgacgccgaaaaaagcctctggcataacgttgagaaccgtcaactggacgctcagttcttccatatgggaatgggattccgtcgccgcgttcgtatgttttctgtagatccagcaacacatctggcgcgtgaaattcactttcgcccggagttgttcaaatacaacgatgcaggtgttgatacaaaacaattagaagggcaaagcgatctcggctttgccggttttcgcgtgtttaaagcccccgaactggcgcgccgtgatgtagtaagttttctcggcgcgagttatttccgcgccgttgatgatacatatcaatacggtttgagcgcccgcggcctggcgatcgacacttacaccgacagtaaagaagagttccccgactttaccgccttctggtttgatacggtaaaaccgggggcaactacctttaccgtttatgcgttgctcgatagcgccagcattactggtgcctataagttcactatccattgtgagaaaagtcaggtgattatggatgtggaaaatcacctgtatgcgcgcaaagacattaaacagctgggcattgcgccgatgaccagtatgttcagctgcggtactaatgaacgtcggatgtgcgatacaattcatccgcaaattcatgactctgatcgtctgtccatgtggcggggcaacggcgagtggatttgccgtccgctgaataatccgcaaaaattgcagttcaatgcttacaccgacaacaacccgaaagggtttggtttattgcaactggatcgtgacttctcccattatcaggacattatgggctggtataacaaacgcccaagtctgtgggtggaaccgcgtaacaagtggggtaagggcaccatcggcctgatggaaatcccaacaacgggcgaaacgctggataacattgtctgcttctggcagccagaaaaagctgtaaaagcaggtgatgagtttgcattccagtatcgtctgtactggagtgcgcaaccgcctgttcattgcccattagcgcgcgttatggcgacgcgtaccggcatgggcggtttcagcgaaggttgggcgccaggtgaacactatcccgaaaaatgggcgcgtcgttttgccgtcgatttcgttggtggtgatctgaaagctgccgcgccaaaaggcattgagccggtgattacgctttccagtggggaagcgaagcaaatcgaaattctctatattgaacccatcgatggttatcgtattcagtttgactggtatccgactagcgactccactgatccggtcgatatgcggatgtatctacgttgtcagggggacgctatcagtgaaacatggctgtatcagtatttcccgccagcgccggataaacgtcagtatgttgacgaccgcgtgatgagttaatcgttttttcttcggcaccttcttcgggaggtgccgtctggttaaacacgatcccgctcgcatttttccctaagttaaatgagtaatctgatggtgtgtatttcagatacaccttgtcagccactaacagggagtgcgtatgtttccagaataccgagatttaatatcccgtctgaaaaacgaaaatcctcgctttatgtccttgttcgataaacacaataaacttgatcatgaaattgccagaaaggaaggttccgacggtcgagggtacaatgcggaagtggtccgcatgaaaaaacaaaagctacagttaaaagatgagatgctcaaaatcctgcagcaggagagcgtcaaagaggtgtaaactttcctaagccgccagccaggcggcttttttaacaactgcatggattgactggagataagatgactgaaacgataaaagtaagcgaaagtcttgaattacatgctgttgcagaaaatcacgtcaaacctctttatcagttaatctgtaaaaataaaacctggttacagcagagcctaaactggccgcagtttgttcaaagtgaagaggacacgcgaaaaacggtgcagggtaatgtgatgttgcatcaacgcggctatgccaaaatgttcatgattttcaaagaagatgaacttatcggcgttatcagctttaatcgtattgaaccactgaataaaaccgctgaaatgggctactggctggacgaatctcatcaggggcaggggatcatttctcaggcgctgcaggcattgattcatcattacgcccagtctggtgaacttagacgcttcgtgatcaaatgtcgggtggacaatccgcaaagcaaccaggtcgctttgcgcaatggttttatccttgaaggttgcctgaaacaggctgagttcctgaatgatgcctatgatgatgtgaacttatacgcgcgtattatcgatagtcaataatcacaataaccctgccagcggcgttcgcgtaatgcgctcctcgccgttaatgacttttggaccacggacatgaaccgtgtcgccatcaaaggcttcaacgacggcgtggtcggttaactccacatggttttcaattatcaccgcacctgtaatacggctctcaccttgtatgacaacgtgctcgtcgagcagaatcggtccgccacgtaccacggcatttccgccaaccaagacatgatgttttaacacacaattaccttccacaatggcatattccgccacctggctactgtaatgaatcgtcggaatggcatcttcttctatgccagctttcacctgcgcgtgaccgtagactttagcgcaatcgcatagccagacattgttctcttcattaccttcaatactggcaaaatcaaaaacttcggcgcgatgttcaataaaagcataccggacgacggcatcgccataaatttgtgcctggtggacaatacggctggcgctaacccttgcgcgatcataaatttggagcaggagttgatggtcgggcgttaagccttgtgcggcgacgatcatagaatgttgatcaattaaggcgtgaccaaatattctacattgcccgtaaactaaactgtcatgaatggtgacgctgtcacttatatatgcaccctggctgatttcactattatcgatccagacgttatccgttgcgtaaacctctccccacagcacgctggtgccggtgatacgcgtattaccggaaatcaccgctccgccgaacgcaatagcattctggtcgtaaatccagcaatttccttcttgtgctaacaccgtttcgcgatcgatccagccgccagcggttcctgctatcacatcgttaaaatcgctaatggcgataatctgccgtaataacacattttttttagtgccatcttcctgataactaaaggctcgctgttcttcacttagacgatatttgcgcatagcgttttcccacaggtgacttactataaccgtagcaaattctgcggctctggctatgctcgagaaaattccataaaatgcatttcaaatatactttataaattaaacaaaatgagtaagaagatgcagagcgataaagtgctcaatttgccggcaggctactttggtattgtgttggggacgatagggatgggatttgcctggcgctatgccagccaggtttggcaggtcagccactggttaggggatgggctggtgattctggcgatgatcatctggggattattgactagcgcatttattgcccgactcatacgctttccgcatagcgtgctggcggaagttcgccatccagtgctgagcagttttgtgagtttgtttccggcaacgacgatgctggtggcgattggttttgttccgtggtttcgcccactggcggtgtgcctgttcagttttggtgtcgtggttcagttggcttatgccgcctggcaaactgcgggattatggcgcggatctcaccctgaagaagctaccacgcctggactgtatctgccgacagttgccaacaactttatcagcgcaatggcctgtggtgcgttgggctacaccgacgccggtctggtgtttttaggcgcaggcgttttcagttggctaagccttgaaccggtgatcttgcagcgtctgcgcagtagcggagaattacccacggcactgcggacaagtctcggcattcagctcgctcctgcgctggtggcttgtagtgcctggctgagcgtcaacggcggcgagggtgacacgctggcgaaaatgcttttcggttatggactgctgcaactgctgtttatgctacgtctgatgccatggtatctctcccagccatttaatgctagtttctggagtttcagcttcggcgtatctgcactggcaaccaccggtttgcatctggggagtggcagcgataatggatttttccatacgctggcggtgccgctgtttatctttaccaattttattattgcaatactgctcatccgtacttttgcgcttctgatgcagggaaaattgttagtcagaaccgagcgcgccgttttaatgaaagcagaggacaaagaatgatcattcgtgacgaaaactattttactgataaatatgaattaacccgcacacactctgaagtactggaagcggtgaaagtggttaaaccgggtaaaacgctggatctgggctgtggcaatggtcgtaacagtctttacctggcagccaatggttatgatgttgacgcatgggataaaaatgccatgagtatcgccaacgtcgagcgcattaaatccattgaaaatctggataatttacacacccgagtcgttgatctgaataacctcacatttgatagacagtacgattttattcttagcactgtggtgctgatgttccttgaggctaaaaccatccccgggttgattgccaatatgcaacgttgcactaaacctggtggttacaacctgattgtggcggcgatggataccgctgattatccatgtaccgtcggcttcccgtttgccttcaaagagggagaattacgtcgatattacgaaggctgggagagggtgaaatacaatgaagacgtcggcgagctgcaccgcaccgacgccaacggtaatcgtattaaactgcgtttcgccacgatgctggcacgtaaaaaatgacccggtaagcacaaaacgcgtgaaaattccccacgctgagatgatttactgttcttcttttcggtaagcatattttttatcgaagggatgtgaaattaatcacagtagtcgaagtttttagcagcttaacttactgaaatttaagtactgatgattgacttagcccctttttcggcattgactatgtcgtctgaaaaggggctgaaaaatttattttcaccaacactttttttgccacaacacgaagcggcgctttttgctataacttagaaagtaatataatcatctcaggaaactattcatgcgtaccacaagttttgcgaaagttgcagctttatgcggcttattggctctgtctggttgtgcatctaaaatcacccagccagataaatattctggttttttaaacaattactctgatttaaaagaaacaaccagcgctacaggtaaacctgttttacgttgggtagacccgagttttgatcaaagcaaatatgacagcatcgtctggaacccaatcacttattatccggtaccgaaaccgagcacccaggtagggcagaaagttctggataaaattttgaactataccaacaccgaaatgaaagaagcgatagcgcagcgtaaaccactggttaccaccgctgggccgcgtagtctgattttccgtggggccattaccggtgtagataccagcaaagaagggctgcaattctatgaagtggttcctgttgcattagtggttgcggggacgcaaatggctacaggccaccgtaccatggatactcgcctctattttgaaggtgagctgattgatgcagcgactaataaaccggttatcaaagtcgttcgtcagggcgaaggtaaagacctgaataacgaaagtacgccaatggctttcgaaaatattaaacaagttattgatgacatggcgaccgatgccaccatgtttgacgttaacaaaaagtaattccagacgcgccatcgttagatggcgctttttatccggtgcgccgtaaaaccccatccttcagggcggggatataaggcgcggttttccacctgaccaggtgtttgctgttgttcaatgtattggcggatgacggatattggcgcacctccgcagctactggcaaaatagccaggactccacaaaacgcctttgtagtaatacctgaatgcaatatctggtcgatctcgtcgcagtcacctacccgatacgcctttgaggctgtttaccagactggatatcgccagtttgggaggatagttaattaacaaatggacgtgatctggttcgccatccatttcaaccagttcagcttcaaaatcagcacatacatttgaaaagtaagtgcgtagtttttctgtcgcgtcatggtcaaaaatctggcgtcggtatctggtgacaaagagcaggtgaacatgcatcaggaaaacacaatgccttccacgccggatatcggtttcttttttcacagaccaaagtatcatttgacctgtgaaacgattacaggcatttaaattccagttaagacccggtggtcaacaggagtgtgaaatgaggcgcttcgcaggcgcatgtcgtttcgttttcaatcgtgctctggcacgtcagaatgagaatcatgaggccggtaataaatacatcccttacgggaaaatggcttcctggctggttgagtggaaaaatgccactgaaacgcaatggcttaaagattctcccagtcagccattgcaacagagtctgaaagaccttgagcgggcttacaaaaacttcttccggaagcgggctgcttttccccgattcaaaaagcggggacagaatgatgcattccgctacccgcagggcgttaagctcgatcaggaaaacagccgtatttttctgccgaaactgggctggatgcgctaccggaacagccgtcaggtcacgggtgttgtgaaaaatgtcactgtcagccagtcctgcggtaagtggtacatcagtattcagacagaaagtgaagtaagtactccggttcaccctagtgcaagtatggtcgggctggatgctggcgtggctaaactcgccacgctgagtgatggcacagtctttgagcctgtaaacagttttcagaaaaaccagaagaagctggcgagacttcagcgacagttaagccgcaaggtcaaattcagcaacaactggcaaaagcagaaacgcaaaatacagcgactgcattcctgtatcgcaaatatccgcagggactaccttcacaaagtcacaacggccgtcagcaaaaaccacgcaatgatagtcattgaggatttgaaggtcagcaacatgagtaagagtgcagcgggtacggtcagccagccggggcgcaatgtccgggcaaaaagtggtttaaaccgtagcatactggatcagggctggtatgaaatgcgccgccagcttgcgtataagcagctctggcgtggcggtcaggtgcttgctgttccgccagcgtatacaagccagcgttgcgcgtactgtggtcatacagcgaaagagaaccgcctgagtcaaagtaaattcagatgccaggtatgtggatatacagcgaacgccgatgtaaatggcgctcgcaacattttagcggcggggcacgccgttcttgcctgtggagagatggtgcagagtggccgcccgttgaagcaggaacccaccgaaatgattcaggcgacagcctgaacgtagcagggatccacgtccttcagggcgtggaggatgtcaatatcggtttctgtcagcgattaaattcaacaccacgtaacaaacgcctccggcaattaatccccaaaacgcagaaccaatcccgaccagcgtcaatccacttgccgttaccagaaatgccaccaccgccgcgtctcgctcacgctcattatgcagcgcctgatacaaactgccgccgatggtacttaacagcgccagacctgccagcatctggatccaacttacgggcagggcagccatcatcccggtaatggcactaccaaacagacctgcgagcaaatagaaaatgcctgcaacggcagcggccagccaacgttgatctttatccggatgcgcttccgggctttggcaaatagccgcggtgattgccgcaataccgacggaataaacgccgaaaggggaaaaaaccagtgccagcaatccagtaaatacaattaatgggctaacaggagcgctatatccagctgctttcattgctgcgatacccggtgcgttttggcttgccatcgtcaccagaaaaagggggagtgcaacgctcaggctgtgagcaaagctaaaatcaggggtaatataagtggggagaacgggtttaaagacaacatcagttgtgacaacgtcaccttgcgcgatgacgatcacgatcccaataatcatcgcggcaattaccgcatagcgcggcgcaacggccttggttgccagccataccagcaacatacttccacacaacgtaaattgaccgtccagactggcaaacgcctgtaaaccaaagcgtaataaaatcccggcaagcattgccgccgcaaggctgtgcggaataatgcgcatcagacgagcaaagagtcccgttatgccgcagaggactattagcgcgttggtgacaataaaaacgccgatggcttcgttaagtgttagtccctgcaatccggtgaccaacaaagccgcgccaggcgtactccatgcggtgagaacaggtacgcgataccataatgtcagagtcagcgtactgacgcccattgccagccccagcgccgtcatccagccagagatttgtgcagtggtggctccggcgacaatcgctgcttgccagattattgccgcactactggcgtagccaattaataccgccagaaaccccgccagtagcgtgggtggaggaatagaaaacagacgcatagtcacctcgtgcgttatagcgtacaggcaccgtagcatttgtccgttataacgcacaagtgataaacttccgttttgccggaggagtcgcatggaaaatctcgctcgctttttatccaccacacttaaacaactacgccagcagcgcggctggagtcttagccgactggcagaagcgacgggcgtttctaaagcaatgttagggcagattgagcgtaatgagtccagtccgacggtcgcgacattatggaaaattgccaccgggttgaacgtaccatttagtacatttatttctccgccgcagtccgctacgcctagtgtttatgatccacaacagcaggcgatggtgatcactagcctgtttccttatgatccacaactctgctttgaacacttcagcattcagatggcatctggtgcaataagcgaaagcacgccccatgagaagggggtaatcgaacatgtcgtcgtcattgatggacaacttgatctgtgcgttgatggggaatggcagacccttaattgtggggaaggcgttcgatttgctgcagacgtcacgcatatctatcgtaatggtggggagcaaaccgtacattttcattccctcatccattacccgcgcagttaagcgggaaaactatttcgcaacgtcgcgcttgtggctaaaatagccgccatttttcagctactggataagaatgtgaccgtatcttctcatcgacttgaactgttaagcccggcacgcgatgccgccattgcccgcgaagctattttgcacggtgccgatgctgtttatatcggcggccctggttttggtgcccgtcataatgccagtaatagcttgaaagatattgccgagctggtgccgtttgcccatcgttatggtgcaaaaattttcgtcacgcttaacaccattttgcatgatgatgagctggaacccgcgcaacggctgattactgacctctaccagaccggtgtcgatgcgctgattgttcaggatatggggattctggaacttgatattccgccgattgaactgcacgccagtacgcagtgcgacattcgtacagttgaaaaagcgaagttcctctctgatgttggcttcacgcagattgtgctggcgcgagagctgaatcttgatcagatccgcgcgattcaccaggctacggacgcgaccattgaattctttattcatggggcactgtgcgtggcctatagcggtcagtgctacatttctcatgcgcaaacagggcgtagcgccaaccgtggcgattgcagccaggcgtgccgtttgccatacacattgaaagacgatcaggggcgggtggtttcctatgaaaaacatctgctgagcatgaaagataacgatcagactgccaacctcggcgcgctgattgatgctggtgtacgctccttcaagattgaagggcgttacaaagatatgagctacgtgaagaatatcaccgcccattatcgccagatgcttgatgccattattgaagaacgtggcgatctggcgcgcgctagtagtggtcgtactgaacatttctttgttccaagcacggaaaagactttccaccgtggtagcacagattattttgtgaatgcccgtaaaggcgatattggcgcgttcgatagcccgaaatttatcggcctgccggtaggcgaagtagtgaaagtggcgaaagatcatctcgatgttgccgttaccgagccactggcaaatggcgatggcctgaacgtgttgattaaacgtgaagtcgtcggttttcgtgccaatacggtcgagaaaaccggagaaaatcagtaccgcgtctggcccaatgaaatgccagcagatttgcacaaaattcgtccacatcacccactaaaccgtaatcttgatcataactggcagcaggcactgacaaaaacctccagcgaacgtcgggtggcggtagacattgaactgggcggctggcaggaacaactgattctgaccctcaccagtgaagagggtgtcagcatcacgcatacgctggacgggcagttcgacgaagccaataacgccgaaaaagcaatgaacaatctgaaggatggtctggcaaaactggggcaaaccctctattacgcccgcgatgtgcaaattaatttgccgggggcgctgtttgtaccaaacagtctgttaaaccagttccgccgtgaagctgctgacatgctggatgctgcgcgtcttgccagttaccagcgcggcagccgtaaaccggttgctgatcctgcgccggtttatccgcaaacgcatctgagtttcctcgcgaacgtatacaaccagaaagcgcgtgaattttatcatcgctatggtgtgcagctgattgacgcggcgtatgaagcacatgaagagaagggcgaagtcccggtgatgatcaccaagcattgtctgcgctttgcctttaatctgtgcccgaaacaggcgaaaggcaatatcaaaagctggaaggcgacgccaatgcaactggttaacggcgatgaagtattaacgctaaagtttgattgccgcccatgcgagatgcacgtcattggcaaaatcaaaaatcacatactgaaaatgccgttaccgggaagcgtagtggcatccgtaagtccggatgagctgctgaaaacattgccgaagcgaaaagggtaaaacgccagttttctggttactcacaacttattgaatctgcatgatattgcctgccgggtaaggcgttacgccgcatccggcatcaaatgactcaacgttgtcccgcttctggtttgcggcttttttgccagtaaaaatgctcgcgcaaaccttccgcgctctcttccgccacagcacgcaattcatcgctgtccgcttcatgacgcagctgatgatccacattctttacccacacaaattcatgtcctttgtgccctgccatgagttgtccactaaacagagcacacgttaataagacaacgcttaacgccttcgtaaacatcctgccacctttttcttaccttttgccgctatgatgccgatcgtttcttgaggttattattcagttttgcaaattagcgcaaagaaattctggaatcttccttcctgattttgcattgcattctgccgttgcggcgatttagtgctattttcgagcaaattacacacggaggtaaacactaatgtttactttgttgatatactcagcggcagggaggcgatgtgaaacaaagcgagttcagacgttggctcgaatctcagggcgtcgatgtagcgaatggcagcaaccatttgaaactcaggtttcatgggaggcgcagtgtcatgccgcgtcacccctgcgatgagattaaagaaccattgcgtaaagcaatcctgaaacaactcggtttgagttaatcgccaattaaaaaggttaatgacatgcgagagacagtcgaaattatgcgttatcccgtcactcttacacccgcgccggaaggcggttatatggtttcttttgtggatatccctgaagcgttgacccagggcgaaactgtcgctgaagcgatggaagcggcaaaagatgctttactgaccgcatttgatttttattttgaagataacgagcttatccctttacctagcccattaaatagtcacgatcactttattgaagtacctttgagcgtcgcctctaaggtattgctgttaaatgcttttttacagagtgaaatcactcagcaagagttagccaggcgaattggcaaacctaaacaggagattactcgcctatttaacttgcatcatgcgacaaaaatcgacgccgtccagctcgcggcaaaggcgcttggcaaagagttaagcctggtgatggtttaattacagttaacgaaaagttgtcatttttaacaactgatatagactgccgaatcatctgcacataattacgattcgataatgaaaaaataccagcagcttgcagaacaattacgcgagcagattgcgagcggtatctggcaacccggcgatcgtttgcctagcttgcgtgaccaggtggcgcttagtggcatgagctttatgactgtcagccatgcctatcagttgctcgaaagtcagggatatattatcgcacgaccgcagagcggttattacgttgcgccacaggcaataaaaatgccgaaagcgccagtcattccagtcactcgagatgaagcagtcgatatcaacacttatatttttgatatgttgcaggccagtcgcgatccgagcgtcgttccgtttgccagcgcctttcccgacccgcgacttttccccctccaacaactaaaccgcagcctggcgcaggtaagcaaaaccgccacagcgatgagcgtgattgaaaacttaccgccaggaaacgcagaactgcgtcaggctattgctcgtcgctatgccttacagggcatcaccatttctcctgatgaaattgtcattactgccggggcgttagaggcattaaacctcagtttgcaagcggtaactgaaccgggcgattgggtgatagtagagaatccttgtttctacggtgcgttgcaggcgctggagcggctacggctgaaggcgttaagcgtggcgacggatgttaaagaagggatagatcttcaggcgctggaactggcgttgcaggagtatccggtgaaagcgtgctggctgatgactaatagccagaatccactcggatttaccttaacgccgcaaaaaaaagcacaactggtggcgttgctcaatcagtacaacgtaacgctgattgaagatgacgtttacagcgaactttattttggacgggaaaaaccgctgcctgcgaaagcgtgggatcgccacgatggcgttttgcattgctctagctttagcaaatgtctggtgcctggttttcgtattggttgggtcgccgccggaaaacatgcacgtaaaattcaacgcttgcagttgatgagtacgctttccaccagcagtccgatgcaacttgcgctggtggattacctttccacgcgccgatacgacgcccatcttcgtcgcctgcgtcgccagcttgcggaacgtaaacaacgtgcctggcaggcactgctgcgttatctgcctgcggaagtgaaaattcatcataatgacagtggttactttctctggttggagctccccgagccgttagatgccggcgaattaagcctggcggcactgacgcatcatatcagtattgcgccgggtaaaatgttttctaccggtgaaaactggagtcgttttttccgttttaataccgcgtggcagtggggagagcgtgaagaacaggcggtaaaacaattaggcaaacttattcaagaacggctgtaatagcgtttaatttaattcctcttagattgggtaatatgaatttcgaatagcagtcatatttcctaactccttgactatactccagaagataaccttacagacggcataatgcgcggtagctcacaacctgaataaattttctcaggggcgaaggtgtgcctgcaagccgccgtctatggttaaacaaggagatatttttacggcacggcggctgaacaattaattacgacaggagtaagaccttatgagcaagacatttgcccgcagcagcctgtgtgcgctcagcatgacaataatgaccgctcacgccgccgaaccgcctaccaatttagataaaccggaagggcgactggatattatcgcctggccgggatacatcgaacgcggacaaactgataaacaatacgactgggtaacgcagttcgaaaaagagacaggctgcgcggtgaatgtgaaaaccgccgcgacttccgatgaaatggtcagtctgatgaccaaagggggttacgatctggttacggcatccggcgatgccagcctgcgtttgattatgggtaaacgcgtgcagccgattaataccgcattgattcccaactggaaaacgctcgatccgcgcgtggttaaaggcgactggtttaatgttggcggcaaagtttacggcacaccttaccaatgggggccgaacctgctgatgtacaacactaaaaccttcccgacgccgccggatagctggcaagtggtttttgttgagcaaaatctgccggacggcaagagcaataaaggccgcgttcaggcttatgatggccctatctatattgcggacgctgcgttgttcgttaaagccactcagccgcagttgggcatcagcgatccgtatcaactcaccgaagaacagtaccaggcggtgctgaaagtgctgcgcgctcaacacagtttgatccatcgctactggcatgacactaccgtgcaaatgagcgatttcaaaaacgagggtgtggttgcttccagtgcctggccctatcaggccaacgccctgaaagccgaaggccagcctgttgctaccgttttcccgaaggagggtgttaccggttgggctgataccaccatgctgcatagcgaagcgaaacatccggtttgcgcctacaaatggatgaactggagtttaacgccaaaagtgcagggcgatgtggcggcctggtttggcagcttaccggtagtgccggaagggtgtaaagccagtccgttattaggcgaaaaaggttgtgaaaccaacggttttaactatttcgacaaaatcgccttctggaaaacgcctatagcagaagggggcaagtttgttccctacagtcgctggacgcaggattacattgccattatgggcggtcgctaacttcgctggggtgctttatgacgtacgcagtggagtttgacaacgtcagccggttgtacggtgacgtgcgcgcagtagatggcgtcagtattgcgataaaagatggtgagttcttctctatgctggggccgtccggctccggcaaaaccacctgcctgcgcctgattgctggcttcgaacagctttccggcggggctatctctatctttggtaaacccgccagcaatctgccaccgtgggagcgggacgtgaatactgtctttcaggactacgcgctatttccgcatatgagcattcttgacaatgtcgcctatgggctgatggtcaaaggcgtgaataaaaagcagcggcacgcaatggcgcaagaggcgctggagaaagtggcgttggggtttgtacatcaacgtaaaccgagtcaactttctggtggtcagcgccagcgggttgctatcgccagagcattggtgaatgaaccgcgcgtattgctgttggatgaaccgctcggcgcactggatctcaaattgcgtgagcagatgcagctggaactgaaaaaactgcaacagtctctcggtatcacttttatcttcgttacccacgatcagggcgaagcgttaagcatgtccgatcgtgtggcggttttcaataatggacgcattgagcaggtcgattccccgcgcgatctctatatgcgcccgcgcacgccgtttgttgccgggttcgttggtacaagcaatgtttttgatggactgatggcagagaaactttgtggcatgacgggaagcttcgccctgcgaccggaacatatccgcctcaacacccctggtgaactgcaggccaatggcacgatccaggcggtgcaatatcagggcgcggcaactcgttttgaactgaaattgaacggcggtgaaaaactgcttgtgagtcaggccaatatgacaggcgaagaactgcctgccacgctcacgcccggacaacaggtgatggtttcctggagccgtgatgtgatggtgccgctggttgaggagaggtgaatggcgatgaatgtattgcaaagtcctagtcgtccaggtctgggtaaggtgtccggtttcttctggcataatccggggctggggctgtttttactgctgcttggcccgctaatgtggtttggcattgtctatttcggcagcctgctgacactgttatggcagggattttatacttttgacgatttcaccatgagcgtaacgccggaactgacgctggcgaatatccgtgcgctgtttaatccggcgaattacgacatcattctccgcacgctgactatggctgtggcagtcactatcgccagcgccattctggcttttccaatggcgtggtatatggcgcgctataccagcgggaaaatgaaagcgtttttttatattgcggtaatgttgccgatgtgggcgagctacattgttaaagcctatgcctggacgttattgctggcaaaagatggcgtggctcagtggtttttacaacatcttgggctggaaccactgctgactgcgttccttacattacctgcggtgggcggaaatacgctgagtacttccgggctggggcgctttctggtgtttctctatatctggttgccgttcatgatcctgcccgttcaggcggcgcttgagcgtttgccgccgagtttgttgcaggcgagcgctgatctcggcgcacgtccacgacaaacctttcgctatgtggtgctgccgctggcaatcccgggtattgccgctggctctatctttaccttcagtctcacactgggcgattttatcgtcccgcagctggttggtcctccaggatattttatcggcaatatggtttattcccagcagggggcgattggcaatatgccgatggcggcggcattcaccctggtgccgattattctcatcgcactgtacctggcgttcgtgaaacgtctgggagcgttcgatgcactctgaacgcgcaccgtttttcctcaaactggcggcctggggcggcgttgttttcctacattttcccatcctgataatcgccgcctatgcgtttaacactgaagatgcggcgtttagttttccaccgcagggcctgacgctgcgctggtttagcgtggcagcacagcgtagtgatattcttgatgccgtgacactgagtcttaaagtggcggcgctggcgacattaattgcgctggtgttagggacgctggcagctgccgcgctgtggcgacgagactttttcggcaaaaacgccattagcctgttactgctgctgcccattgcgctgccgggcattgtcactggtctggcgttattaaccgcctttaaaaccatcaatctggagccgggatttttcaccatcgtggtcggtcatgcgactttttgtgtagttgtggtgtttaacaatgtcatcgcccgttttcgccgcacctcctggagtctggttgaggcgagtatggatcttggggccaatggctggcaaaccttccgctacgtagtgttgccgaatctcagtagcgcgttactggcaggaggaatgctggcgtttgccttgagcttcgatgaaatcatcgttacgacctttacggcaggtcatgaacgaacgttaccgttgtggttgctcaatcagcttgggcgaccgcgtgatgtaccggtaactaacgtggtggcactgctggttatgttggtaacaaccttgccgatcctgggggcctggtggctaacccgcgaaggcgacaatggtcaataaccactgatacaggaatatgctatgcaacataagttactgattaacggagaactggttagcggcgaaggggaaaaacagcctgtctataatccggcaacgggggacgttttactggaaattgccgaggcatccgcagagcaggtcgatgctgctgtgcgcgcggcagatgcagcatttgccgaatgggggcaaaccacgccgaaagtgcgtgcggaatgtctgctgaaactggctgatgttatcgaagaaaatggtcaggtttttgccgaactggagtcccgtaattgtggcaaaccgctgcatagtgcgttcaatgatgaaatcccggcgattgtcgatgtttttcgctttttcgcgggtgcggcgcgctgtctgaatggtctggcggcaggtgaatatcttgaaggtcatactagcatgatccgtcgcgatccgttgggggtcgtggcttctatcgcaccgtggaattatccgctgatgatggccgcgtggaaacttgctccggcgctggcggcagggaactgcgtagtgcttaaaccaagtgaaattaccccgctgaccgcgttgaagttggcagagctggcgaaagatatcttcccggcaggcgtgattaacatactgtttggcagaggcaaaacggtgggtgatccgctgaccggtcatcccaaagtgcggatggtgagcctgacgggctctatcgccaccggcgagcacatcatcagccataccgcgagctccattaagcgtactcatatggaacttggtggcaaagcgccagtgattgtttttgatgatgcggatattgaagcagtggtcgaaggtgtacgtacatttggctattacaatgctggacaggattgtactgcggcttgtcggatctacgcgcaaaaaggcatttacgatacgctggtggaaaaactgggtgctgcggtggcaacgttaaaatctggtgcgccagatgacgagtctacggagcttggacctttaagcagcctggcgcatctcgaacgcgtcggcaaggcagtagaagaggcgaaagcgacagggcacatcaaagtgatcactggcggtgaaaagcgcaagggtaatggctattactatgcgccgacgctgctggctggcgcattacaggacgatgccatcgtgcaaaaagaggtatttggtccagtagtgagtgttacgcccttcgacaacgaagaacaggtggtgaactgggcgaatgacagccagtacggacttgcatctagcgtatggacgaaagatgtgggcagggcgcatcgcgtcagcgcacggctgcaatatggttgtacctgggtcaatacccatttcatgctggtaagtgaaatgccgcacggtgggcagaaactttctggttacggcaaggatatgagtctttatgggctggaggattacaccgtcgtccgccacgtcatggttaaacattaaggataatattgcagatcgtaagagtatgagatgatcttgcgtactgtcagagcactgatttctctgacagtacgtgctgcgtgcaaaatcactacatcaaataaaccagccaaatctcatagagataagagtaaacaaaccaacagcagcaaagaaatttatcagtactacagttctactggaaacattcatttttgccaccttttatcattgcccctatgtgtatagtacgggttaagaaaatccgcaataatactcattctgaagatggataagggcaagttgctgtttgatgattttttctcaaactggtgaaaaaacttgatgcacgtcaaaaaatgacgcatatttgcgcgcgttttattcatctggctggacgcccgtacatgtctctctatcaacacatgcttgttttttatgcggttatggcagcaatcgcatttcttatcacctggtttctttctcacgataagaaacgcatccgtttcttaagcgcctttctggtgggggcaacatggccgatgagtttcccggtggcgctgttgtttagtctgttttaaatcttactcactggcttgacggcaccacgcagacttatatcatttggatgaatcgataaatttcacaagtggctaaggagaaagtatgagccatctggatgaagtcatcgcgcgcgtggatgccgcgattgaagagagcgtcattgcccatatgaacgaattattaatcgccctgagcgatgacgcggagttaagtcgggaagatcgctacacccagcagcaacgtctgcgcacagcgatcgcccatcacggtcgcaagcataaagaagatatggaagcgcgccacgaacagttaaccaaaggcggcaccatcctctgattaaaaactgcgtctggctaccaaccaggcgccaaccacaagtaaaattgcgccacaaattgggccgaacaacgcccgtagtggtacgccatgactgcggaagatatccagcatcagaccgccaatcagctgactggcgaccagtacagcaatagttgtcgccgctcccacattctgatatccgctgatactggcgaagacaaaaaagcttcccagcaagccaggtataagtgtccaccagcgcacgctggacaccagttcgccaaaccccgccatgccttgtttaaaccataaaatagaaacaaagagcacaatccccaccagactgttcagcaacatggcgatgagaatggtagaggaggtctgggtgatgcgcaccatcagcgtgttctggacaaccagaccaattccggcggcaatcaaaaaagcaagggtgaggctctgattcatccaatcgcgtccggttcagtgcgctcgtcgagttgcaactgcataaatgtcagatccagccaacgaccaaatttagtgcctacctgcggcatttgcgcggtgacgacaaatcccaggctctggtggagatgcaggctggcctgattttggctttcgatcccggcgaccatgacatgcttcccgcaatcccgcgcttcatcaatcaatcggcttaacaatttacgccccagacctttgccctgatgatcgggatggacataaacgctatgttccacggtatggcgaaaaccatcgaaactacgccagtcgccaaagctggcatatcccgtcactacgccgttttcctcgctcaccagcactggataacctgctaaagtccgcgcttcaaaccaggcaatgcggttatcagcatccaccgtttggtcattccagatagccgccgtatacaacacggcgtggttataaatttccgcaatggcagcacagtcggctttgcgggcaaaacggatggacatgtctggcctcaataaaataatgatgatgatgttatcaatactatcgaaaacagcccgaagcaacggattcctcgatgaaattattgcgtgttgcagaggggatgtgacggctgcaaacaaaaccaatcccgtgagcctgctactattgatggattcatgccaaaagcacaggagagcattatggggcaacaaaagcagcgtaatcgacgttgggttctggccagccgtccacatggcgcacctgttccggagaatttccgtcttgaagaagatgatgtcgccacaccgggtgaaggacaggtgttactgcgcacagtttatttgtccctggacccgtatatgcgtggacgtatgagcgatgagccatcttatagtccgcctgttgatattggcggcgtgatggtcggcggtacggtgagccgtgtcgtggagagcaatcatcctgattatcagtctggcgactgggtgctgggctacagtggatggcaagactatgacatatccagtggtgatgatctggtgaaacttggcgatcatccgcaaaatccaagctggagcctgggtgtgctagggatgccaggctttaccgcttatatgggcctactggatatcggtcagcctaaagagggcgaaacgttggtggtagctgcggcgacaggaccagtgggggcgacggtggggcaaatcggcaaacttaaaggttgcagagtggtgggggtagccggtggcgcggaaaaatgccgccatgctaccgaggtgttaggcttcgatgtttgtcttgatcaccacgcggatgattttgccgaacaactggcgaaagcgtgcccaaaaggtattgatatctattatgaaaacgtgggcggtaaggtattcgatgcggtgctaccgttacttaatacatctgcgcgcattcccgtctgcggattagtgagcagctataacgctacagagctaccacccggtccggatcgtttacctctgttgatggctacagtgctgaaaaaacgtattcgcttgcaaggttttattatcgctcaggattatggtcaccgcatccatgagtttcagagggagatggggcaatgggtgaaagaggataaaatccactaccgcgaagaaattactgacggtttagagaatgcgccacagacgtttatcggcctgctgaagggtaaaaacttcggcaaagtggtgatccgcgtggcgggtgatgattaaagtttcaacggcggcgtaagccgccataaaaatccaggcaaaaagcttattttcagctttaattaactaaccacatcattgttctgctgctaataacaacaaaggtgagtggtttatgattattcactttaatacaccaggtgaattccttctgccatgcaggcagggttggacagaaaacacgcgaaggaattaaaatgcctggaacgggaaaaatgaaacatgtcagtttgactctgcaggttgagaacgacctgaaacatcagcttagtattggcgcattaaaacctggcgcacgcctgattactaaaaatctggcggagcaattaggtatgagtattacacctgtgcgtgaagcattattacgtctggttagcgtgaatgcgctttctgtcgcacctgcacaagcatttacagttccggaagtggggaaacgtcaattagacgaaatcaatcggatccgctacgaactggaattaatggcagttgctctggctgttgaaaacctcaccccgcaagaccttgcggaactccaggaattgctcgagaaattacagcaggcgcaagaaaagggcgacatggaacaaatcattaatgtaaacaggctatttcgcttagcgatttatcatcgcagtaatatgcccatcctgtgtgagatgattgagcaactgtgggtcaggatggggcctggtttacattatctctatgaagcgattaatccagcggaattacgggagcatatagaaaactatcatctgttactcgctgcgttaaaagcaaaagacaaagagggatgcagacattgtcttgctgaaattatgcaacaaaatattgctattttataccagcaatacaatcgttaaagtaaatgcccggcaaataccgggcatcaaggtaattactcaaatctccacgcaatattcatgccgacaccataatttcgtccggggctaggttcgtaatatcgcccgttactctcattgacaatgacagaaccaacgtattctttatcgaataaattatcgacacgaccaaataaatccacagttaaattgtggtaattgtatttatacccggtgaataagccgacgagagtataagacggcgcttttgccgtattttcatcatctgccataatatcgcccatataacgcgcttccgtgcctgcataccaaccatcttccggtacataacctatgctcgcaaagcccatattacgggcgatccctggcatccgattaccgttacaatcctgttcattgcaaacattgctgcgataggtcgcatcaagccaggtccaggacgcgtttacgcgaaaatctcctgcgaaacgttgatcccatgccagttcagcgccttgacgacgggtctttccggcatttttgtaagtcgtacgcccaccgctactgctatcgacaacaatttcatcatcagtgtcggtctgaaacaatgcgagactaagcagcccatcaccaatacgcgttttactgccgatctcaattgtatcgttggtggatggttttaaacctaagttcataccgctttgcccatcagcacgataagacagctcattaatcgtcggcgtttcaaaacctcgcccggctgccagatagatattccaggcatcggtcattgcatattttaagctaccggcaggtagccatttatgataactggcatcaccgctgtcatcgccgttacccggagtaacgtaatggtcgttggaatcaaaccacacggagctgtagcgcacgccagcatccaggctcagtttttcgctcagctgccactgcgtctgtaaatagggatcgatgttccacatcagattgcgttcgtcgcgacgcaactcacctttttgcccgtactccggcatgccgctattcaggcggaagttattgtagcccttgcggttttcactcatgttttcgtagttcaggccggtagtgaacgtgaccggaacgcccagttcaccacggtgtgtccagcggctgtctattccctggtaatggcgttgcagggtaatcacgccgcccgcatgactcgggttaagttgtggtgccatgggtatactctggtactgggtcgtttctcgctctccggcatacatcatcacactcatatcatcccggctactcaggctacgctcatagcgcaacccagcctgagtttgcttgatggtttttcgcgtgtcgtactgttctgcacgaggcgcttgttgtggattagccttccattctgctttggttagcccacctgggtcatctgctttgatatccacactattgaaaatcagacttaatttgctggcttcatcaatgcgtacgcccagtttggcattggctaaatttttctgtgcgccactatggtcacgatagccgtgggtcgtaaaacgcgtggtactgacggtgtaatcgacatcgccaggctgtgtgccgtctcccgttgcgcccgttgctttcagcccatagcgccagctgccaaaactgccgtagtaactactggcttcaatggttggtggctgttgtccggtctgggtggtgacattcattaccccaccagacgcgttgccatacagggcagagaaggggccacgcagcacttccacattttgcacactgcttaaatcgatgttggatgtttgcccttgcccgtcgggcatggtggcgggaataccgtccacatacaggcgaataccgcgaataccgtaagtggagcgggagccaaatccgcgaatgctcagctgtaaatcttgcgcatagttctgccggttttgtacctgcaaaccaggcacgccggtcagactttcggacaagttaatgcgcggtgttgccaggcgcatctcctcgccatccaccacgcttactgctgctggggtatccagttcactaaccacctgcggtgcggcactgacaatcatagtctgttcatcagcggcaaaaacaacgggggaaaggacaagcagtgcgggcaaaacggtctgtcggacggaaaaaatcttcatgaaaaaagccaggttaagaatgggaaaacgccgtcatggtaatgaaattgtaaatttatggaaaatgaaacggcacaatacgttaagtaattgagaaaattgtagtcgtaacggcaagaaatgctccacatttgagaaaataatgattaccattcccatttataacaagagcgtaacgatgattacgcttagcgaagcattgtgaagcagcaaaaatatcggttcatcaaagggagtcgtcatgcatttacgtcatctgtttagtagccgcctgcgtggtagtttactgttaggtagtttgcttgttgttagtagtttcagtacgcaggccgcagaagaaatgctgcgtaaagcggtaggtaaaggtgcctacgaaatggcttatagccagcaagaaaacgcgctgtggctcgccactagccaaagccgcaaactggataaaggtggcgtggtttatcgtcttgatccggtcactctggaagtgacgcaggcgatccataacgatctcaagccgtttggtgccaccatcaataacacgactcagacgttgtggtttggtaacaccgtaaacagcgcggtcacggcgatagatgccaaaacgggcgaagtgaaaggccgtctggtgctggatgatcgtaagcgcacggaagaggtgcgcccgctgcaaccgcgtgagctggtagctgacgatgccacgaacaccgtttacatcagtggtattggtaaagagagcgtgatttgggtcgttgatggcgggaatatcaaactgaaaaccgccatccagaacaccggtaaaatgagtaccggtctggcgctggatagcgaaggcaaacgtctttacaccactaacgctgacggcgaattgattaccatcgacaccgccgacaataaaatcctcagccgtaaaaagctgctggatgacggcaaagagcacttctttatcaacattagccttgataccgccaggcagcgtgcatttatcaccgattctaaagccgcagaagtgttagtggtcgatacccgtaatggcaatattctggcgaaggttgcggcaccggaaagtctggctgtgctgtttaaccccgcgcgtaatgaagcctacgtaacgcatcgtcaggcaggtaaagtcagtgtgattgacgcgaaaagctataaagtggtgaaaacgttcgatacgccgactcatccaaacagcctggcgctgtctgccgatggcaaaacgctgtatgtcagtgtgaaacaaaaatccactaaacagcaggaagctacccagccagacgatgtgattcgtattgcgctgtaatagatatggcgagggtgaaaacggtgagacttgcctgccttttatcacggcgtatccggcactttcgtcagtaatctgaatttgcccggcacgtagccgggcaattttgcaattaactcgccgtttcaggcttaaacacaatttcctgtttttcttcatcttcctcgacgactggcgcagtgctgtgaatttcagcaacgcgtttgcgcacaccaaaccagcctataaccagcaaaataccgataatcggcagcgccgcgatagtataagtcccgttcgggtaatcgaacgccatcagcacaaggacactcagtaaaaacagtaatgtcagccaggaagtgaagggcgcgccaggcagtttaaaactgacatccgctgctttgccttctttaatcgctttacgcaggcgcatctggcacacgatgataaacgcccaactagcgatgattcccaggctcgcgaagttcaacacaatctcaaatacgcggctcggcaccagatagttgaggaatacgccgacgacatacacaactagtgtcgccagaatcccggcatacggcacatgctgacgactcattttcgccataaaactcggtgcggaaccgcccatcgccatactgcgcagaatacgtccggtgcagtacagaccactattcaggctggagagggcagcggtcagcaccacaatgttcataatgctgccgatatatggcacacccagtttagagaaaaacgtcacgaacggactttgccccgcctgatacgcgctccacggcaataacataaccagcaacaccacggagccgacgtaaaacaggccaatacgccaaatcacactgttaatggctttaggcaccatggtctgcggatctttacattctccggcagctgtacccaccatttcaatggaggcaaaagcaaacactacgccctgaatcaacaccagcgcaggcagcaaaccgtgggggaagaagccgccattatcggtgattaaatgaaagccagtggtgttgccatccagcggctgaccactaccgaggaacactgtacccacgaccaaaaaggtcacaatggcgagcactttaataagcgcaaaccagaactccatctccgcaaaccatttcacaccgatcatattcatggtgccaacgatggtaagtgcagcgagcgcaaagacccactgcggcacgccgccaaacgcaccccagtaatgcatatacagagcgacggcggtaatatcaacaatccccgtcatcgcccagttgatgaagtacatccagccagcaacataagcggctttctcacccaaaaactcacgggcataagaaacaaaactgccactggaagggcggtgtagcaccagctcacccaatgcacgcagaataaaaaagctaaacaagccacaaattaaataaaccagtgccagtgcgggccccgccatttgcagtcgggctcctgcacctaaaaacaagccggtgccaatcgcgccgccaatggcgatcatctgcacctggcgattgcccatcgctttgtgatacccctcttcgtgggcattaagccagcggcgtttcgcggcgtgttgatcactagtgtcggtgtcgtgtttactcattgctctccctgattgctttaatgaaaaagtcatataagttgccatgaacaatgtttattcatcctggcgatgatagttatcaccattattctttatgggtataaaactatcggcgcagcatcctacccgttatcgataaacgatgcaaaacatccccttacaatcctgaaggggattaatacaactgacgaaaaaatgacaaatccttttgctggttaacctgtgtactgtcctacacttaatctttaaaagattgtgaggggcatatgattaaggtgtatggcgtacccggatggggctctacaatcagtgagctgatgctaacactggctgatattccttatcagttcgttgatgtcagtggttttgaccacgagggagctagtcgcgagttattgaaaaccctgaacccgttgtgtcaggttccgacactggcattggaaaatgacgagattatgacggagacagcggcgattgcattgatggttctcgatcgtcgcccggaccttgcgccaccggttgggcgcgccgaacgtcagctgtttcaacggctattggtctggctggttgctaatgtctatccaacattcactttcgccgattaccctgagcgttgggctcctgacgcacctgaacagttaaagaagaatgttattgaatatcgaaaaagcctttatatctggttgaatagccagctcactgctgaaccttatgcgtttggtgagcaactaacgctggtggactgttatctttgcactatgcgcacatgggggcctgggcatgaatggtttcaggataatgccacgaatatcagtgcgattgctgatgctgtatgtcagttaccgaaattacaagaagtattaaaaaggaatgaaattatttgagtgggataccagaagattatgttatttattattcagtaactttatccacaatgatgggcgtaattaattaaattcatggtatgttttttaatttatatcactctccttttcattcagcgtgtctatttcatttcctctgaaaagaaactaactattcacatcgtgcagatgtttcagttgttaagtcaggcattctataatctcaaaatgtttttaatgatggatatgctcggagttggagatgcaattaatattaatacaaataaaaatatccggcaggtatgctaaaaggataaatggcgttctctgtatttattcgcaattatctgtaggacaaatatggagagcttgatgagtcagagctaaaacagcaattgattaataaacatgttgatttattcaagaaaatggatgtattttaaatgttgattcttaatataacctaatcaatagattatcaagtgagagctacacattattggaggggcaggggaaaacaccattttgggaacaatgcatcaggtactcttaccactgaagcaagatcatccggcaccaggtggtggtgcagtgctttggaaatggtcccctcgggggagttgtcattattttctatgctatttgcttattatattcatcaggtgaatttaataaattcctaatttgaaatatccactattaagctagtgtttaacgacgttaagatggcaatgtgcagatcatgttatcagggtggggcggtagcgtatattccttatacaaaccatcattcatttcaatgattgttattgaattatttattgttgtgaataaaaagacattatgaatattggtttgactttgcatatcaggttttttattactcgctgtaatgtacgagcctgtcgtgaataacgtcgagaacccatccgttgcgtttgtgattattttgttgactaaacagacacccgtttctctgaagtaaaatcccagactaaatcatcacataaccatgacatttttctgatattccccggtaacgccagataacgatgccaaatttaccgttatgttcaatcaactccctggtccatgtcgatttatctaccacaatcgccacgcgtggaggttcaaactccaccggcattgaccaggctgcagccataatgttacgccgctgggattgctcatcgaaactggtgatcaagaccgttgggccatgatttaacagacggctggcatggtgtaattctatggggatgaatcggctcatggtatcgcctcgcgaagaaggtttttttaagcgtagtccgtaacgcaataagtaacgaaattaacgggattggcgatttgcgaacgtgatgcatgtccgcgatcgcacaaaatagccggtgcggcgtctattccaggttataagttgagaaaaccactaagggaaacgcctgatgacgcccattctgaatcactattttgcccgtattaactggagcggagctgctgcggtcaatattgatacgcttcgtgcattgcacctgaaacacaattgcaccattccgtttgaaaacctcgacgttttgctgccgagggaaatacagcttgataatcaaagcccggaagagaaactggtgatagcccgtcgtggcggttactgttttgagcagaatggcgtgtttgagcgggtgttacgcgagctggggtttaacgttcgcagcttgttagggcgcgtagtgttaagtaatccgccagcattaccgccgcgcacccatcgtttgctgttggtggaactggaagaggaaaaatggattgctgatgtcggtttcggtgggcagacgctaaccgcgccgattcgtttagtttccgatctcgtgcagaccacgccacacggagagtatcggttgttgcaggagggtgatgattgggtgttgcagtttaatcatcatcagcattggcagagcatgtaccgttttgatctctgcgagcagcaacaaagcgattatgtgatgggcaatttctggagcgcgcactggccgcagagccattttcgccatcatttgctgatgtgccgccatttgccggacggcggcaagctgacactgaccaattttcattttacccattatgaaaatgggcacgcggtggagcagcgaaatctaccggatgtggcgagtttatatgctgtgatgcaagaacagtttggtctgggcgtggatgatgcgaaacatggctttaccgtggatgagttagcgctggtgatggcggcgtttgatacgcacccggaggcgggaaaataatttatgtcaggttgccggatgcggcgtaaacgccttatccggcatacattagcccggttgtagacctgacaggcgaagcgcatcagacaacggtttcagagttcaattgcccattcggcatgaaacaaaatcaccgctgtgccactaatggtgactttttccggttggttatcacgaattgtcaccgtcacttcaatcataccgtcacgccccaatgcgcgcccctgatggcctttaacacgcaacacgttgccatcgtggggcaatacgttgtgatgtaccaaccatgcacccatcgggccattggcattgccagtcaccggatcttccacaataccaatcgcagggctgaacatgcgaccatcggtttcgtttttgcctgggcggatctggaacgggaagaaaccattgcagccaatctttttgctgatagcggtcagcgcattaaggtcagggctaagggcgtcgatatccacttccggtttcagtgggatcatcactttactgtgtcctgttgttgccacctgaattggcaagcctggcagaatatcgtcctcagtgagatgaagcgcgttgataatcgccgcacgtgtttcaccttccagcggtggctcaaagcccggcgtaccttgttccaggctaatacgataatcatcgttgtgcttttcgatagtcacgcgatgttttcctgccaggcttgtttgccagatcgtgcaatttcctaaacctaacaccttcgcacgtacatagtgcgcagctactgtcgcgtgaccgcaaatcggcacttcaaccgttggcgtaaagtagcggatgcgcacatcgctgtcgtcgctgtgcagcagaaaagcagtttcgctatggcctaactcgcgggcgataagctgcatttgcgcttcgctaagattatcggcggggaaaacaacaccggcagaattgccgcgaaacggttgactggtaaaagcatcgacgtggtacacctgcggtttcattaacgttctcctgtgactggagaactatcatagcctgcaagtggccggagagcgaagggctatccggccagggtgaaattatcgccggctacgcacaatttgatatcgacgagtaaagtactcaaacggcgcgctccacacatgcaccagtcgggtgaacgggaagagcaggaagatggtcattcccaacaccagatgcaggcggaagacgaacgctacgccgttgagcatctcactgcttccaccacggaaagtgacaatgctttgcgcccaacccaccagcttcatcatttcgctaccatcaggatactgtgcactaaacggtatggtacttagccccaacagacactggatcagcaaaatgctcatgatgatgatatccggcgtagtggaagtggcacgcacgcgctgatttgtcagcctgcgccacagcagtcctgcgccgccaatcaacgtcaacacaccgcaaataccgccgagcaccatcgccatgagttgtttcgctgccactggcaaaaaccacgcgtacatccagtgcggcgttaacatgccgaacaagtgcccgaagaaaatccccaaaatgccgatatggaacagattgctccatatcaccatcccgcgtttatcgagcatttgactactggaggcgcgccaggtgtactgcccgtagtcgtagcgcagccagctgccgaggaaaaacaccgtcgcacaaatgtacgggtagatatcgtaaaaaaagacgttcagatactgaatcatttcccacctcccgcactgatgtcgacatattgcggcgcgacatcctggctaaagcgtcgctgatattgattaagcgggctgctgtcacacgccgtggcgttatcttcaataaacttcacctgttcctcttcccacactgcatcaagcgcctggcgggtgtcatcgcgctcttcgctgtttacttgttttgtgacactgtcactactaagggagcttcccgccagttgcagcagagcatcaaacaacgcgtaccacggtgcctcgcgttgttttaagcgaccgccaagcagggcgaggatcggcgcaacattgagcaatccttctttcgcctgatcgtcaggcagtacgcttaaatactccagatacagcggtagataatcgggcagttcccgacaatccagctgcaggccgaccttttcatactccgccagcaggtccaccattgcctggccgcgatcgcgggactcggcatgaacatgttcgaacagcagcaggctcgtggtgcgcccgcggtcaaacacttcgcaccattcggcctgtttatccagcagcggcgcgttaagcaggttgtgggtgaaatccgtaagcatcggcgcgtcgcggcggatcaacgccagcgcgtcctccttgcattcccacaacagctcgtccggatactccatcaacaggccgatcactttgaggatctgcattattcgccctccgctttgtcgcgcacttcggtgatgttgatggcatcgatacggctactgttgaacaggttgaatttactgtcgctaccgtggcaaccgtcgccaaaggtaaaaccgcagccgttgcgttctgcgaaggcatcgcccgccatttcccgatggctggtcgggataacaaaacgatcttcatagttggcaatggcgagatagcgatacatctcttcgacctgggcgacgctcaggcctacttcgtcgatggcacgagtatcagtaacgccttccacggtttgactacgcatatagtggcgcatcgccatcatccgtttcagcgcccgcagtaccggaccggtatcgccggcactcaacatattggcgagatattgcaccggaatacgcaggctttcgatggcgggcagcacgccttcgcttttcggcaaaccgcccgcatctgcgtaggactgaatcggactcagcggaggaacgtaccagaccatcggcagggtgcggtattcagggtgcaacggtagtgccagtttccagtccatcgccattttgtagactgggctacgctgggcagcgtcaatcacattttgtggaataccttgtttcagggcttcctcgatcacactgggatcgtgtggatcgaggaacacttcgcactggcgttcatagaggtcaacttcgcgctcggtgctcgccgcttcctcgatgcggtcggcgtcgtaaagcagcacgcccagataccggatgcgacccacgcaggtttcactgcacacggtcggttgaccggactcaattcgtgggtaacagaagatgcatttttcactcttgccgcttttccagttgaagtagatttttttgtacggacaaccgcttatgcacaaacgccagccacggcatttatcctgatcaatcagcacaatgccgtcttcttcgcgtttgtagatagcgccgcttgggcaggtcgccacgcagctgggattgaggcagtgttcgcacaggcgcggcaggtacatcatgaaggtgttttcaaactgcccgtacatctccttttgcatggcctcgaagttgcggtcgcgggcacgtttttcgaactcaccgcccagcagttcttcccagtttggcccccagatcactttgtccatccgtttgccgtcaatcagactacgcgggcgagcagtaggaatatgtttgccttccggtgcgctatgcaaatgttcgtagtcgaaggtgaaaggttcgtagtaatcatcaatctgcggcaccaccgggttggcgaagattttggttattacgcccatcttgttgcccagacgcgggcgtatcttgccattcacatcacgcacccagccgccttgccactcttcctgatcttcccagtttttcggataaccaatgcccggtttggtttcgacgttgttaaaccatgcgtactccatgccttcgcgcccggtccagacgtttttacaggtcacgctacaggtatggcagccgatacatttgtcgaggttaagcaccatgccgacttgactacggattttcattttttcgcctcctgtacctgatcgcgaccttcatcatccagccagttaacgttcttcatcttgcggatcatgatgaactcatcgcggttgcttccgacggtgccgtagtagttaaagccccaggccagctgcgcgtaaccgccaatcatatgcgttggtttcgggcaaacgcgggtaacgctgttatgaatgccgccgcgcatgccagttacttcgctaccaggaatattcataatgcgttcctgggcgtgatacatcatggtcatgcccggcggtacacgttggctgaccaccgcgcgggcagtcagcgcgccgttggcgttgaatacttccacccagtcgttatcgacaatggtcagttctcgggcatctgtttcgctgatccagacaatcggtccaccgcgagagagcgtcagcattagcaggttttcactgtaggtactgtgaatgccccatttctggtgcggcgtcaggaagttaagtgctttttccgggaagccgtttggcggtatctggcgcatctcactgacgctacgggtgtcgataggcgggcgataagccaccaggctttcaccaaaagcacgcatccacggatgatcctgatagagctgctggcgtccgctcagcgtgcgccacggaattaactcatgaacgttggtgtatcccgcgttataggagacgtgatcgctttccagaccggaccaggtggggctggagataattttacgcggctgcgcctgaatatcgcgaaagcgaatcttctcgtcctctttgtgcagcgccagatgggtatgttcgcgcccggtgatctcgcccagcgcctgccacgctttgactgcaacatgaccgttggtttccggtgccagtgccagaatcacttcactagcgtcaatggcggtgtcaatcagcggacgcccctgtgccgggccatcacgcttggtgtaattgagtttgccgaggaaatcgatttcatcctgggtattccagctaatccctttaccgccattgccaagtttgtccatcaatggcccgaggctggtaaagcgttcatacgtagcagggtagtcgcgctccaccgccacaatattcggcgcggttttgcctggaatcagatcgcattcgcctttgcgccagtcgagcacttcacacggctgactgagctctgccggagagtcatgcagtaggggttgtaataccacgtcggtttctttgccaagatgacccacgcacacttggctaaatgctttggcgatacctttgtagatttcccagtcgctgcgactttcccacgccggatcgaccgccgcagaaagcggatgaataaacggatgcatatcgctggtgttcatatcgtctttttcgtaccaggtggcggtgggcagaacgatatcggagaacaggcaggtactggacatgcggaagtcgagcgtcaccagcaggtcgagcttgccttcaatcgctgcagtttgccactcgacttcttccggtttgatcccgtcgctggcaccgagttcctcgccctgaatcccgctttcggtccccagcagatacttctgcatatactcgtggcctttgccggaggagccaagcaggttagagcgccagacaaacaaattacgcggatgattgctgctgctatctggttgttcgcaggccatacgtaaatcgccgcttttcagcgcctgggcggtaaattctgtgggggataatccggccttgtcggcttcagctttaatcccgagcgggttacgccccagctgcggcgcagaaggtagccagcccatacgttcggcgcgaacgttgaaatcaatcagatgaccgctgtacttactggcatcggcgagcggactaagtaactcctgagcagagactttttcatagcgccattggctggaatgattgtagaaaaagctggtgctgttcatttggcgcggtggtcggttccagtcgagcgcaaaggccagtggcaaccagccggtttgtgggcgcagtttttcctggccgacatagtgtgcccagccgccaccgctttgcccgacacaaccgcagaagatcagcatattgatcatcccgcggtagttcatgtccatgtgataccagtggttaacacctgcgccgaggataatcatgctgcgcccatgcgttttatgggcggtatcggcaaattcacgggcgatggtttcaatatactggcgcggcacgccggtaatttgctcaccccaggctggggtgtacggtttgatttcagcgtaatctttcgcactgttttcatcttccagcccgcgatcgaggccgtaattcgccagtaccaaatcataaacgctgaccaccggacaggtgttgccatcgactaacgtcaggtttttaacgggcaattggcgcaccagcaccggattgtgttttacgctgcgaaaatgcggattttcaatgccgccaaagtaggggaaggccacgcctgcaacagcgtcatgttgaccgagcagggttaagctcaattcggtttccgtaccggcggcaatggattccagattccatttgcctttttctccccagcggaaaccaatgctaccgttcggcactaccaattcacctgcggtattaactgctacggttttccactgcggattgttgctttcgcccagtccatccaccaggtcagatgcgcggatcatgcgcccgggaacgtagctaccatcgtcgcgaggctccagcattaccagcatcggcatgtcgctgtagcggcggcagtagttgataaagtagtcgctgggattatcgagatgaaactcttttaaaatcacatggcccattgccatcgccagggcgctatcagtgccttgtttcggtgccagccactggtcgcacaatttggccacttcagagtagtcaggggtaatggcgatggttttagtgcctttgtagcgtacttcggtaaagaagtgggcgtccggcgtacgtgtctgcggtacgttagacccccaggcgatgatgtagctggagttataccagtcggcagattccggtacgtcggtttgctcgccccaggtcatcgggctggcgggcggcaggtcgcaataccagtcgtagaaacttaaacaggtgccgccaagcaggctcagataacgcgttccggcggcgtaagaaaccatgctcatcgccgggatcgggctgaaaccggcaacgcgatccgggccgtaggttttgatggtccagacgttagcggcggcaatcagctggtttagttcctgccagttggagcggataaacccgccgcgcccacgcacttgtttgtagctcaggcacttttgcggatcgttcataatgcttgcccacgccagtaccggatcgctgtgttgcttgagggcttcgcgccacagttcaatcagtcgtttacgaatgagcgggtatttcaggcggttagcgctgtaaagataccaggagtaacttgcgccacgcgggcagccgcgaggttcatgattgggcaggtcagggcgagtgcgcgggtagtcggtctgttggatttcccaggtcaccagaccatttttaacgtagattttccagctacaggagcctgtacagttaacaccgtgggtggaacgcacgattttgtcgaactgccaacgctggcgatagctgtcctcccagtcgcggttgctatgcatcacctgtccgtgaccatcggcaaaggtttcgcccttttgtttgaagtagcgaaagcgatccaaaagtttactcatgacatgactcctgctccaggaatgaattgggatctgatgccttgtcggatgcgacacggttgtacatcaggcatcgatctcttatttttggctgaacttccgccgaccataaaccagccaggtcagcagcacacaaacgatgtagaagattaaaaacactttcatcgcgccgaccggagagccggtcatattgaggctcatgccaaacgcctgcggaataaaaaagccgcccactgcgccaatggcactgataaagcccagagccgccgccgtttcggtgacggcttcttcatgagcttgctcatcactaccgcctttcatctttacccgataaatggttatctggcgaaagatgacggcgatcatctggaaagtagaaccacttcccagacccgcagtcagaaacagccccataaatacggcgtaaaaggcgatgaaattaccggagcctgtgcccggtaaggtaaggaacagcagggcactgaaaatcgccataaaaataaagttgatcaacgtcacccgcacgccgccgaacttatcggaaatagcaccaccaacgctccgcgcgatggcaccgataaatgggccaaagaacgccaggcgcagaatattcacatccgggaactgggtttttgccagcatggcaaaacccgcagaaaaaccgataaagctaccgaaggtggcaaggtaaagcaggctcagcagccagagatgcaggcgttgtaagacagggagctggtcggcaatactggcgcgactactggcgatatcattcatcccactccatgcggcgatcgtggcaatcgccagtagcggtacccaaatccatgcggcattcgccaggctcatcacgctaccgtcggcctgcggtacgccattgacgccgagaaaggcaaatacaggtacaaaaatgaccagcggtgcaaccagctgcattacacttacacctaagtttcctaatccgccattaatcccaagagcgctcccttgtttggcttttggaaagaagaaactgatattgcccatgctgctagcaaagtttgcacctgcaaaaccgcatagcaaagcgataacgataaatatcccaaaaggagtattcggattttgcacggcaattccgagccagacgcaaggaataatcaggattgcagtactaaaaaccgtccatcggcgtccaccgaatataggcaccataaaggagtagggaacacgcaataatgcgccagaaacggagggtaatgcggttaataaaaagagttgatcggtagtaaaattaaaaccgattttattgagattaacggtaactgcgctaaatagcatccagacacagaaggcaagaagtagacaactgacacttatccagagatttcttcgagcaatatgttttcctttattttcccagaaggccggattttctggtttccagtcgcgcaaaagataacgactatttttctcattttgcagtgccatattgttcctcacatgcacacattggtaatgaaaaaaagacaaaacacgaggtaaggcgcaatagccagttattagaattaaggatgaattgggtgaagtgctgattgaaagaatagataagaaagcgtaaccgcgggggcagaatggggattaagtagccagatatgtgttactaaatgtaactaacaagctaaccttcaaacggggttaatctttgaacgtatgtcatgtttcaacccttcagatcgtgaatctaaagggttacatattaactatattatcaacaagaccagacacttatagaattagtgatgatttattcattaaaaaggccaactactggaggaaaagcttctgtccagaaggtctatcggttcctctcttattgcctgattgtaataatcgttattacagtaagtattgtttatttcatctaaggtcatgtttttaacttttatattcatctggtttacaacttcctctgtcttgtaagtgtgtatattatatggggtatatgcttttttaataggatagtgaaacaattcgttatccacatctattccgtcagagtgaacttcaaatgcaccagggctaagaattgccaggccagtattaagcttaagtgctggggaaaacaaattaaataacatgagctgcatagtagggcaattgttcttcccagaaacatttaaaaaatttaagttttgctctgttttattatggggaataaagttccaatatcggatgtattattagtatcaatgtgggttattttattattgtccagtcttaaacttttgatagatggaagataagtcaggaaatcaagatttatatatttcaactggttgttagcagcgtttaatgtctgaacattgcagaagttgctatagaatattttaatttcagaaagcaaattgttgttaataagtaacgtattcaagttgggaaataagtcattgtgtaaacttgttagtttattatgggatagatccagcagtaagagttcatttttattacctgcaacaatatcagttaattgattatggctgagattcaggtattgcagccattcgcaagattctaattgcacaaactctagttgattatgtgccgcactaaaataagtaacactactaagcctatctatatcaatatttctgagagcattattattcatagatatatgtgtaatacttacatttctgccttgaggaaaatttatactctcaagagcattactattcagacttagctttacgagtctatcgtagttggttgcatcaaaatgtgtgaattggttattatcaagattgatagatgtgaagttttgcagccctggtggttgagtggttaaattaagtccacttaaatcaatggtcacttcattagtgtcatcaattatatttcttactgcagtccagtactgcatttgtgcaagtggatcattgttgatgccgttaactaatacatgccaaagatgtttactacttattagttgatcaatgtcattggttggcagtaaattgttattgcttaagtttaaatattccagttttgtagtgtttttggcgtttaaatgtgcaatatggttgtcgtttaaagtgattgttttcatcctgggatgattgtgtaatataaggtcagtgatcatattgtgatgggcacttaactcaatcagagattcttgccgcggctgccgttggcttcatcgttatagcctttaaaatcatattcccagtgaccaaaaccaatcatttgatcattgatttgcgtttctcctttaaagccgagacgggcataagttttatcaccatcgtcacgcttatcatcagtaaaataacgtagagcggtaaccttgccataaaggtcgagtttattaccatccttgttatagacttcggcagcgtgtgctacgttcgcagctaacaaaccagttacaaccaccgcaactatttttaatttcatttaacagaatccttttaattatcgttaaacgtattttctaaacgaattttaaacggcgtcatttataaatgacatactgtttttaaaatagaatggtgattaaaaacaatgagaaaaatagatgaaataatattatttatcgatatgtgatcgaagtcgaaatgagatataaggtgaattactggtatttgaaatttatttttttaatattgtcggaatttatctgattaactaccgggccgtagacccggcagttattttaaccacgacgtgtcgccagccagcagagcagggaaccgccgcagaccatcagcgcgccttgccagaagctgaagctcagcggggcgctgagcagcacggctgcaagcgcactggaaagtacaggcgtaaaatagctacctaccgccataatggtgacattgccatgcaatataccgacattccatgcagcataagcaaatcctaaggtaaatgccgcagagatgagtttaatcatgacgggcgtgctaaatatcatttctggttgtggcgtaagaaaatagtaaacccacagacttgctcccgttagcaggacaaaaacggtaattccattaaatccgcgtgcgtatttattcgttactgtgcaataggctgcccagataaacgcaccaatgaacgccaggaaataactcaatgggctggtggtgatattattgatgatttcatcataatgtaacccattgtcaccgcctaacacccaacagacgccgacgagggctaataataatccaggtacaatcaaccagttggttttctgaccattaaacagaatggcaaagagaattgtcaggctgggccacagatagttcaccatacccacttcaatcgcctgatgatgggtcgccgcataccctaaggaaagcgccagacagatttcatagctgacgaataacagactcccggcgagtaaatagcctttcgggatttgccgaatacgcggaaatccaaccgtgaagattaacagcagcccgcttaaactatagatagcagctgcgccgccgaccgggccgagcccctcactgacaccgcgaatcaatcctaccatcgtgctccacaggacgatcgctatcagccctatgagcgttgctttttgtcgtgtcatgctcgctgttttgtctctcttgccgttaaaaattaagctgaattttatagcatttttttaactggcctgtcaggcagtggtgcgtttttctaccgctattgaggtaggtcaatttgcgaaggcggattattttgtggcaaacagatgttctttttgatttcgcgcaaaaagattcagaattttactgttagtttcctcgcgcagtaatacccctgaaaaaagaggaaagcaatggacgtcagtcgcagacaattttttaaaatctgcgcgggcggtatggctggaacaacagtagcggcattgggctttgccccgaagcaagcactggctcaggcgcgaaactacaaattattacgcgctaaagagatccgtaacacctgcacatactgttccgtaggttgcgggctattgatgtatagcctgggtgatggcgcaaaaaacgccagagaagcgatttatcacattgaaggtgacccggatcatccggtaagccgtggtgcgctgtgcccgaaaggggccggtttgctggattacgtcaacagtgaaaaccgtctgcgctacccggaatatcgtgcgccaggttctgacaaatggcagcgcattagctgggaagaagcattctcccgtattgcgaagctgatgaaagctgaccgtgacgctaactttattgaaaagaacgagcagggcgtaacggtaaaccgttggctttctaccggtatgctgtgtgcctccggtgccagcaacgaaaccgggatgctgacccagaaatttgcccgctccctcgggatgctggcggtagacaaccaggcgcgcgtctgacacggaccaacggtagcaagtcttgctccaacatttggtcgcggtgcgatgaccaaccactgggtggatatcaaaaacgctaacgtcgtgatggtgatgggcggtaacgctgctgaagcgcatcccgtcggtttccgctgggcgatggaagcgaaaaacaacaacgacgcaaccttgatcgttgtcgatccccgttttacgcgtaccgcttctgtggcggatatttacgcgcctattcgttccggtacggacattacgttcctgtctggcgttttgcgctacctgatcgaaaacaacaaaatcaacgccgaatacgttaagcattacaccaacgccagcctgctggtgcgtgatgattttgctttcgaagacggtctgttcagcggctacgacgctgaaaaacgtcaatacgataaaagctcctggaactatcagctcgatgaaaacggctatgcgaaacgcgatgaaacactgactcatccgcgctgtgtgtggaacctgctgaaagagcacgtttcccgctacacgccggacgtcgttgaaaacatctgcggtacgccaaaagccgacttcctgaaagtgtgtgaagtgctggcctccaccagcgcaccggatcgcacaaccaccttcctgtacgcgctgggctggacgcagcacactgtgggtgcgcagaacatccgtactatggcgatgatccagttgctgctcggtaacatgggtatggccggtggcggcgtgaacgcattgcgtggtcactccaacattcagggcttgactgacttaggcctgctctctaccagcctgccaggttatctgacgctgccgagtgaaaaacaggttgatttgcagagctatctggaagcgaacacgccgaaagcgacgctggctgatcaggtgaactactggagcaactatccgaagttcttcgttagcctgatgaaatctttctatggcgatgccgcgcagaaagagaacaactggggctatgactggctgccgaagtgggaccagacctacgacgtcatcaagtatttcaacatgatggatgaaggcaaagtcaccggttatttctgccagggctttaacccggttgcgtccttcccggacaaaaacaaagtggtgagctgcctgagcaagctgaagtacatggtggttatcgatccgctggtgactgaaacctctaccttctggcagaaccacggtgagagcaacgatgtcgatccggcgtctattcagactgaagtattccgtctgcctagcacctgctttgctgaagaagatggttctatcgctaactccggtcgctggttgcagtggcactggaaaggtcaggacgcgccgggcgaagcgcgtaacgacggtgaaattctggcgggtatctaccatcatctgcgcgagctgtaccagtccgaaggtggtaaaggcgtagaaccgctgatgaagatgagctggaactacaagcagccgcacgaaccgcaatctgacgaagtggctaaagagaacaacggctacgcgctggaagatctctatgacgctaatggcgtgcttattgcgaagaaaggtcagttgctgagtagctttgcgcatctgcgtgatgacggtacaaccgcatcttcttgctggatctacaccggtagctggacagagcagggcaaccagatggctaaccgcgataactccgacccgtccggtctggggaatacgctgggatgggcctgggcgtggccgctcaaccgtcgcgtgctgtacaaccgtgctagcgcggatatcaacggtaaaccgtgggatccgaaacggatgctgatccagtggaacggcagcaagtggacgggtaacgatattcctgacttcggcaatgccgcaccgggtacgccaaccgggccgtttatcatgcagccggaagggatgggacgcctgtttgccatcaacaaaatggcggaaggtccgttcccggaacactacgagccgattgaaacgccgctgggcactaacccgctgcatccgaacgtggtgtctaacccggttgttcgtctgtatgaacaagacgcgctgcggatgggtaaaaaagagcagttcccgtatgtgggtacgacctatcgtctgaccgagcacttccacacctggaccaagcacgcattgctcaacgcaattgctcagccggaacagtttgtggaaatcagcgaaacgctggcggcggcgaaaggcattaataatggcgatcgtgtcactgtctccagcaagcgtggctttatccgcgcggtggctgtggtaacgcgtcgtctgaaaccgctgaatgtaaatggtcagcaggttgaaacggtgggtattccaatccactggggctttgagggtgtcgcgcgtaaaggttatatcgctaacactctgacgccgaatgtcggtgatgcaaacagccaaacgccggaatataaagcgttcttagtcaacatcgagaaggcgtaagggggcgaacagatggctatggaaacgcaggacattatcaaaaggtccgcaactaactccatcacgccgccttctcaggtgcgtgattacaaagcagaagtcgcaaaacttatcgacgtttccacctgtatcggctgtaaagcctgtcaggtggcgtgtagcgagtggaacgacatccgtgatgaagtggggcactgcgtcggggtttacgataaccccgccgatctgagcgccaagtcctggacggtgatgcgctttagcgaaaccgaacagaacggcaagctggagtggctgatccgtaaagacggctgtatgcactgtgaagatcccggctgcctgaaggcgtgcccgtctgctggtgcaatcattcagtacgctaacgggattgtcgatttccagagcgaaaactgcatcggctgtggttactgcattgccgggtgtccgtttaatattccgcgcctcaacaaagaggataaccgggtatataaatgcacgctctgcgtcgatcgcgtcagcgtcggccaggaaccggcttgtgtgaaaacctgtccgaccggggctatccacttcggcaccaagaaggagatgctggagctggcggaacagcgcgtggcgaaactgaaagcgcgtggttacgaacatgctggcgtctacaacccggaaggggtcggtggtacgcacgttatgtacgtgctgcatcacgccgatcagccggagctgtatcacggtctgccgaaagatccgaagatcgacaccagcgtaagcctgtggaaaggcgcgttgaaaccgctggcagcggctggctttattgccacttttgccgggttgattttccactacatcggtattggcccgaataaggaagtggacgatgacgaggaggatcatcatgagtaagagcaaaatgattgtgcgcaccaaatttattgatcgcgcctgtcactggaccgtggtgatttgcttcttcctggtggcgctgtccgggattagcttcttcttcccgacgctgcaatggctgacgcaaaccttcggtacgccgcagatgggacgcattttgcacccgttcttcggcattgcgattttcgtcgcactgatgtttatgtttgtgcgttttgtgcatcacaacatcccggataagaaagatattccgtggctgttgaacattgtcgaagtattgaaaggcaatgagcataaagtggcggatgtcggtaagtacaacgccgggcaaaagatgatgttctggagcatcatgagcatgattttcgtgctgctggtgaccggggtgattatctggcgtccgtactttgcgcagtacttcccgatgcaggttgttcgctacagcctgctgatccacgcggctgcgggtatcatcctgatccacgccatcctgatccatatgtatatggcattttgggtgaaaggaagcattaaagggatgatcgaagggaaggtaagtcgtcgctgggcgaagaaacaccatccgcgctggtatcgtgaaatcgagaaggcagaagcgaaaaaagagagtgaagaagggatataatctcttttgaactttaagctgaaaatggcgctgtaaaaggcgccattttcatattgtagacaacgtaggctttgttcatgccggatgcggcgtgaacgccttatccggcatgaaaacccttcaaatccaatagattgcagtgaacgtgtaggcctgataagcgtagcgcatcaggcaatgttgcgtttgtcatcagtttcaaatggcgctgtaaaaggcgtcattttcatattgtagacaacgtaggctttgttcatgccggatgcggcgtgaacgccttatccggcatgaaaacccttcaaatccaatagattgcagtgaacgtgtaggcctgataagcgtagcgcatcaggcaatgttgcgtttgtcatcagttctaaatggcgctttataaagtgccatttttttattgcgtaaccagacggcgtaatcggctcacatccactgttttttctgcctctgccagactccaggcgttttgcagattcagccacatttgcgggctactgccgatcaccacggaaagtttaatcgccatttctggcgtcaaagctgcttttcctgtcagcaatcggcttgccgtactgggagcaatttccattgctctggcaaactcgcgcaggctgacattaagttcgtccagactttcctgaataatgtcccccgggcggggatgattggccattttcattagtgtctttactctcagtagcgttccttcactgggaacactatcattattgttccttcctacgcaacaataatccatttagccatttcatgttggagagtgtgcgatgctgcgacccgaacatggcagtcgcagcaaaggcctcttagtgacggaaatcaatcaccatgcggccacggattttgccttcttccatctcagtaaagatggtgttgatgtccgctaacggacgcagggcgactttcggcaccactttaccttcggcggcaaactggaaggcttcagttaaatcctggcgcgtgccgaccaggctaccgaccacttcaataccatccagcacaagacgtgggatatccaggctcatagactccggcggtagaccgacagccacaacacgaccgcctgcacggacagcatcaactgcgctgttaaacgcagctttagctaccgctgttaccaccgcagcgtgagcgccaccagttttctcctgcacaattttggcggcgtcttcggtgtgactgttaatcgctaaatctgcgcccatttcggttgccagttttaactgctcatcattgacatcaatggcgatcactttggcgttaaagacattcttcgcgtattgcagggcgaggttacccagaccgccaagaccgtagatagcaatccactgccctggacgaattttactcagcttaacggctttgtaggtggtgactcccgcacaggtaatgctgctggccgccgcgctgtccagaccatctggcacttttaccgcgtaatcggcgaccacgatgcactcttccgccatcccgccatcaacgctgtatccggcatttttaacactacggcagagcgtttcgttaccactgttacagtattcgcaatgaccgcatccttcgtagaaccacgccacgctggcacgatcgcctggttttaaactggtgacacctggacccacttctgccaccacaccgatgccttcatggcccagaattacgccggttttgtcaccaaaatcgccattcttaacatgaagatcggtatgacatacaccacaacactccattttcagcagggcttcgccatgtttcagactgcgcagtgttttatacgtaacgtcaacatgatgatccttcgtaacaactgcagccttcatagttcctccttttcggatgatgttctgcatagcaggtgaggcaaatgagatttattcgccactacccagtatggatgagatctgaaaaagggagagggaaatagcccggtagccttcactaccgggcgcaggcttagatggaggtacggcggtagtcgcggtattcggcttgccagaaattatcgtcaatggcctgttgcagggcttcggcagaggttttcaccgccacgccttgctgctgcgccattttgccaaccgcaaacgcaattgcgcgggagactttctgaatatctttcagttccggcagtaccataccttcgccgttcagcaccaatggactatactgcgccagcgtttcacttgcgctcatcagcatctcatcggtgatacgactcgcgccggaagcaataacacccaggccgatgcccgggaaaataaaggcgttgttacactgggcgatagggtagattttatctttccataccactggattaaacgggctgcccgtggcgaccagcgcgttaccttcggtccaggcgataatgtcctgcggtgtggcttccacgcgactcgtcgggttagacagcggcatcacgatcggacgcggacagtgtttatgcatctcacggatgatctcttccgtaaacagcccggtctgtccactgacgccaatcagaatatctggttttacattgcgcaccacatccagcagactcagcacatcgctgtcggtatcccagtcactgaggttttcgcgcttctgcaccagtttggtctggaaaggcagcaggttcggcatcttgtcagtcagcaagccaaagcgatcgaccataaagactttctgccgcgccgcttcctcgcttaatccttcgcgctgggtctgggagatgatcatttcggcaatgccgcatcccgcactacctgcgccaaggaagacgatttttttctcgcttaactgaccacctgccgcgcggcttgctgcgatcagtgtgccgactgttaccgccgcagtgccctgaatgtcatcgttaaaagaacaaatttcattgcgatagcggttaagtaacggcatcgcatttttttgagcaaagtcttcaaactgcaacagcacgtctggccagcgttgtttcacagcctggataaattcatcaacgaattcatagtattcgtcgtcagtgatacgcggattacgccagcccatatacagcggatcgttaagcagctgttggttgttcgttccgacatccagcaccaccggaagggtatacgccgggctgatgccgccacaggcggtatagaggctcagtttaccgatcggaatgcccatcccgccgatgccctggtcaccaagccccagaatgcgttcaccgtcagtcaccacaatcactttaatattatggttcggcacgttttgcagaatatcgtccatattgtgccggttctggtaagagataaacacgccgcgactacggcggtagatctcagaaaaacgctcacaggctgcgccgacggttggggtataaataacaggcatcatctcatcaagatgattgtttaccagacggtagaagagggtttcgttagtgtcctggatgttacgcaggtagatgtgtttgtcgatttcggttttgaatccctgatactggatccatgctcgttccgcttgttcttcgatggtttcgaccacttccggcagtaaccccagcaggttgaagttacggcgttcttccatgctgaaggcactgcctttattcaacaacggaaattccagcagtacagggccagcgtaagggatataaaggctacgctgtttttttgtttttggttccatgtcactcactcttttttgaatatccatccctggggggcttttatcgtctttgctttaccgccagggcgtcggcctcaagtataaagcagataaaaacaaaaacaccattgcgcaggcaatggtgtttaatcgtcattgaggactgatggttatgaattacttttcagcggggcgttttctgccggttgggttatttactacgctggatttgtcaccttcggtaactattttgcgctggttagaaattttatggtccagtccaagaatatgacgtgcctgacggttgcttttcattttaactcctcaatcctgtagctagttttaaggacaacatcgccgtagcgaagaaacacgtgctaaacccctaaattaggttgccgatcaagcatagcaccttaaagcgtagggtgctggccactgaccacataattgatcgtttgctggtagatatcactgaggatgtcgttatcagaagcttcaacccatttggtcagctccatgagaatgtcatcttcagtgacaacaccatgctgtgcccgaaggccttgctcaatggcattaaccagagcgggttctgctgtactattttctgcctgataataagtaaacatagtgattctccgtgtctgtgtatttatggtgtctgctacggatcgcagatttataaagcacattcagcatggcaaatatttgccgcttcgttgttaagattagtcctggttgatgatttttatattttaacaccatgatattcatagggattgtgattggtatgatccgattaatattgatacaatatcttttgggttatatattcccggtaatctattgtgggaatttaatttaagtgcagaagtaatattttcgccggattttattcggaatatcctgcttatcctcgtgctgtttctcacgtagtctataatttcctttttaagcccacaggagagcaacaatgacaatccataagaaaggtcaggcacactgggaaggcgatatcaaacgcgggaagggaacagtatccaccgagagtggcgtgctgaaccaacagccgtatggatttaacacgcgttttgaaggcgaaaaaggaaccaaccctgaagaactgattggcgcagcgcatgccgcatgtttcagtatggcgcttagtttaatgctgggggaagcgggattcacgccaacaagcattgataccaccgccgatgtgagcctggataaagtggatgccggttttgcgattacgaaaatcgcactgaagagtgaagttgcggtgccgggtattgatgcctctacctttgacggcataatccagaaagcaaaagcaggatgcccggtctctcaggtactgaaagcggaaattacgctggattaccagttgaaaagctaaagcattgccggatgacgcgtcaggcgcgtgaatgcctgatgcgttgttagcatctttacagcgcccgccagcaccggagctcacgtccgtcctcccttattgctaaactttgccggacttcacatccgtgggttgccagcgggcaacgttcgtagaaaaaacagccttgcggcaacgtgcggtttcccggcagatccgttttacgtaatgcccattcttcctccagcggtttatcaatggcggggagggaatccagcaataatcgggtgtatggatgtgcaggtgccgtcagcacctgctgcgcgtcgcccagttctacaatctgcccgagatacatcaccgccacccgatcgctcatatgacgtatcacgctgacattgtgactaatcagcacataggtcagcccgtgattttcctgtagcgttaccagtaaattgaggatctgcgcctgaacggagatatccagcgcagaggttggctcatcaagcacaatcacgtcaggctggctagagagtgctctggcaatggcgatacgttgccgctgcccgccggagaacgcatgaggcaggcggtcgagatactccggacgaatacccacctgcacagccaactcctctgccaacgctcgccgctgttgttcactactacgcttagctatccagagcggttctgtgatgatgcgccacaccggtaagcgcggattaaggctagagagcgggtcctgaaacaccatctgcataatgcgttgactgccagaacggatgtactgcccgtggctcggttgcagcatacccattaaaagctgtgcgagggtgcttttgccgcagccactctcgccgacgatccctaaggtttcaccacggcggatctgtaaatcaataccattaatggcatgaacatgttccgtagttttaccaagccagtttttacgggccgggaaattgatatggacgtcgcgtaacgttaataacgtgtcagacacttataacctcctgctgcggataccaacaggcacagcgctggttgttgtcaccacacgctgtcagcgccgggacgttttcacactgtgcacctgccgcatagcaacgatcgcgaaaagcgcagccgtcaggcaaatgggtgaggtttggtaccgtccctggaatggcgggtaatagctggcgtggtactccatgttctggtgcgcattgcagcaaaccaatggtatacggatgccggggatgatggataacgtctgccgtcacgccgctttcaattacgcttccggcatacatcacgtaaacgctatcgcacagttggctcaccacggccatatcatggctgatgaacagaaccgcagttccactggcgcgggctttatgtttaagcaaacgcagtacctgcaactgcaccgtgacgtccagcgccgtagtcggttcgtcggcaataatcaattgcggctcgcaggagaatgccagcgcaatcattacccgctggcgcataccaccactaagctcaaacggatagcggctcataacttccacggcatccgggatttgcatctcttccagcaggtcaatcgctttagctctggcttcccgacgacttattggttgatgatggcggatcacgtccatcatctgaagacctattcgacgtgtcggattgaggtcggtcatcggttcctgaaagatcatcgccactcgtgcgccgcgccactgacgaagctgtttttcccgcgcgttaagaacatcttctcccagcagggaaatctgcccccgatgtacgcaataactgcccgtcggtagcagacgcataatcagcattgcggtgacacttttaccactgccggattctcccaccagaccgacaatttcaccgcggttaatctgcaaggacacattgttgagcgcgtgaacatcaccgttaaaaccggggaaactcaaatgcagttgttgaatgtccagaacgggttgggtcatgactgctttcctcctgctttttagttcaactctgctttcctcctgctttcgggtcaagcagatcgcgaataccatcaccaaagagattaaacccgacggcggtaagcaaaatcgctgcccccggaaatgcgcaataccaccactgatcgagtacatagttgcgaccatttgctaccatcgcgccccattcagcactcggttgttgagcacccaggccaataaatcccaacgtggcggccattaaaatcgcgctaccgatatccaggcttgcctgcacgatcagcggcggtagggagttacgtaaaatatgccagttgatcagatgccaacgagacgcgccaaaggttttcgccgcctgaacataggtatactggcgtacaactaatgcttgcccccgcgccaggcgcacataaaagggaattcgcacaatagcaatagccagcatggcgttaaacaaactcggcccgagagcggcagccagtgccattgtcagtaccaagctaggaatgctcagcataatgtccatgatgcgcatgatgatggcgtctgcgcgtccaccaagcacaccggatagacatccgagtaggctaccaatcatacccgcaatggcaaccacgactaatccggcgagaatactttgctgactgccgaccagtacgcggctaaacagatcgcgtcccacttcatcggtgccaaaccagtgcgccgcagaaggcggcaaaaggcgggcggttaaatcaatggcgttgggatcatgcgtcgccagccacggactaaaaatcatcatcaatagcattaatacaatgatgactgcgctggtcacggtgagcggactgcctttcagcatccataccagttttgcaccgttaaatcgcgtttgtttttgtgggcgtacggcggacgtttcctcgcttagcatcattcaccacctccacgtccgatacgcggatcaatccacaaatagagcaaatccaccaccaggttgaccagcacataagcaaaactaaccacgacggcaaagcccatcactgccgggaagtcgagcgcctgtatacttgttactacccatgcacccattccgggccaggcaaaaacggtttcggtgagcactgcgccatacaacaaatcgcccagcgccaaacccaatacggtaatgcttgggatcaacgcattgggtagcgcataacataaaacgatataccagccgggcaagccgctggcccgggcggtacgaatgtagtcttcactcaattgttccagcatcgcactgcggatctggcgagcgacaattcccaggtgaacgaacgccagcgttaatgccggtaagatgagatgttgcaacgcattgaagaagacttcaccgttgccttcaagcagcgcatcgagcagataaaagccggtaacgtgcgttggtggatccagccagtcatcaagccttccgccgccgggaagaatttgcagatgaccataaaacagcacaatgacgcccagcccaagccagaacgcaggtgtggagattccggtaatggccattattcgcaccagatgatccagccagcgatttcgccagactgcagagagtatgcccagcgggatgccaatcaggagtgccagcagcagggcaccaaaagccagctccagcgtcgccgggaaaaatatacgcaactcttccagcaccggacgcccggtacgaatggatgttcccaggtcaccatgaaacaggtcgctgacgtagcggtaaaactgtacatacagtggctggtccagtcccagttgctggcgaatattttccacgatagcatcgctggcgcggtcacccgccagtaaccgcgccggatcaccagggatcagatggctgataataaacgtaatcacgcagacgcccgccaccacgagcaccagcccccagcagcgttggcgtaaaatactccagaaggtcacgttatttactcatggtattgatattgaagacctgttccagcatgggattgaacacaaagcctttcacctctttgttcatcgccagttggtagtttttctggaacaggtacacataagcagcgtcatcaatgacgattttctgtgcctgctggtagtcccgggtacgctgcgtctggtcggtggtcgcaagcgcattgcgcagtaacttatcgacctcactgttttcatagaagctgcggttacccggcagaccttttttgtcactctcaaaccagtaattcataaacatatacgggtcggcaaaatccggactccagttgccaatcgcaatgtcgtaatcacctttacccactctgtcgcgcatggtggcgttcgccagcttttccagcttcacaatgatgcccagcttgttgagactggattgtgtcgccagagcaataggctcccagttcggatcgttatcggagtagagaaacgtcaggctggtgggtttgctcgtcactttatcccattcggctttggctttcgtttcgtcatggttgtattgcattgccgtcgcatcgtagccccacatgccttccggaatcgggccgcgcatctgttttccgttaccactcagaatgccgttaaccatgccctgataatcggtagaccaggaaatggcccgacgcagatccgcctgattaagaggcgctttgctgttattcagatacagataggtaacgcgcagactcggatactctgccacattgactttattttcctgcttcagggcgttgagttgatccaccggcagcgcatcggcaatgtcaatgtcgccacgggagagctgcaggcgacgggaggcactttcaccaataatttttacgcttacccgtttgaagttcggtttattgcctgggtaatgcggatttggcaccagaactaattgctgacctttttgccagcttttcagcataaatggtccggaaccggcggtattttgcgcgaggaagccgcgagcatcatccgctgcatgttcctttaagaccgccggattgataatggatgcaccgtcattcgccagcgtgtagaggaacggtgcgaatggttggctaagggtaaacttcaccgtatgttcgtcgggagcatcaatctttaaatctttgggaaatgcttctgctggcccctggccgatttttagtagccgctcaaaagaaagttttactgcttcggcagtgacaggtgtgccatcggcaaatttagcattatctttcagggtgaacgtccactctttttgatcgtcagacgctttccagctacttgccagatcgccttcaacgtcggtactgcctttatcaccgtccgttttgtactgaaccagccgctgataagacgggtaggtcactgtccagtcgttattatctattgttaccgccgggtcgagggtttgtggatcggcggccttaccaatcaccagcatatcttttggtacggcggcgtgcgcaaccgggaaatttgtggcaaggacgagcgcgagcaatgtgggacgaaagcttatgcttctcttcatgacagtttcctgattaactgacgtgctgtgtgccaggggatataaaacaagagaattgatcagcgagcagagggtaactcgctgcctggggtaattcgaagtgccaccattcgctggagataccgacaaaaccgccaccagtcattatcgcattcagcaacagccgattgcgctgagcggcgggcgggacggaagggtgataggcatgggagcgctcgtgcatttcatcgaaccctgcgcccatatcgaggatgttcccgtgctcatcacgaagcgtcaggtcgatcgccgtgccacggctgtgattagaaccgaccgtcacatcaacaacatattgcgggtctgggcaggcttgccacaacatcgcctgtgcttgttgtgggcgatacgcatcgtaaatcaccagttgtaacccactcagctgggcgatgctgatacttttcgccagcgcggtaatcgcatccttgtgtaacagacaacgcgcttgctgataaatagctttacctgtgatgttatcagcgcaggcgtatttcaattcgatctccagatcagggaagattacggctaaatcaaccagttcggtggtatcgctcataaacggttcctgtataagacaaaaattgctgcgctttccgcttatgcagatctcatgccatgccgggataagcgccagaatgctggcttaaagttatattttttaacttttgatcaacatttgtgcagcgtagtgcagttttggtgcaagaggggaagttaaggaaggaatctcccggaatcgtagctgaaatcacagtatttaagtgacagtgtcacgttaaatgaaaacccgcgagtgcgggcgagaggaatttgtcagattttcagcggtaacacgctgctcatccagcctggaatttcttcggcgggtagggggcgggaaaagaaatatccctgaataacgcgacagtggatcttgcgtagcatctcaaattgctctttggtttcgacgccttccgccacgacggttaaattgaggctttgcccaatgctggtaatggcttcaagtaaggcaaggatgcgtttttcggtcagacaacgatcgacaaaacttttgtcaattttgatttccgttaccggaagactgactaagcgggataatccggaaaagcccgtaccaaaatcatctacgcttaagcccacgcccatatcacgcaggatctgaatgcgcttaaagatttcggtatcgtgttccatcatcatgctttccgtgatttctaccgtcagctggtggccgtcaataccccaggcgtgcattgcatcagacacctgattaggcagttgattactgcgaaagtgcagcgcgctcaagttcacggataacgccgggatatgaatattctggctacgccattctgctaactgacggcaagcttccgcgatgacccagcgcccaatattttcgatttcaccaatctcttctgcgagaggaataaaccgactagggggcacatgaccatgcaggggatcgtgccagcgagcaagggcttcgatgccgtacagttcacccgtttctgcgaagatttgcggctggtaaaccagtttcagttggttattgctaatcgcttctttcagcgctgcgcctaaaaccaaacgctcttttaccatttcgttcatcgccgggctgaagaactgccagccgttaccgccattcttgcgaatataatccattgcattgtgagcagtggagagcaagtaatcgcggtttttacccaggtcgtagctgatgccaatactcaaggtaagcgggaagggtttatcgtcaatcattatcggcttgctgaccacattccgtagctcatcggcgatttgggtaatgttactgacgtcgttttcgaggctcacgaggacaaactgcgtaccttcgatacgacagagatactgatccggtttgagtttttcacgaaagcgattgaccacttccagcaatgcctgatcggcccacgcatagccaaggctatcaatcacatcctgaatatggtcaacaccgatgagatacaccacgggagagacggctttgtcgaccaggtcatcgaggtaattgtgcaggttattgcgatttggcagaccggtcatcggatcaaattggatgagttgttcaatatgctgacggcttttttcctgttccagcgccagcgcggccatatgctggctgatatctgccacgcgttcgataaaggcgctggtttctgctccactgctggttttaatttgcaggatccccgcaggcgcgccatcacgctgacgaatggtcgcactccagctttgcgcattttgaatttctgcaccgtgggaagaactcgcccagtgtatcggcatcccgttgcgcagtgcgaacaggctaacatggctttcgttgagtacagattcgatgttacgacaaatgatttcccccatttcatgaaatggcgggctgctgcacatggcggcgagaatattgccttcaagctggcgaatctgccgttcttcggtgatatcgctgaaagtcattaccaggttctgcagatgcgcgagcacgtcataaaccgggctgatagaggctttaatccagattttttcaccggtgcgcgtcaacagcagaaattcgtcctgatcgcgggcggttttccatagcaactgttgtaaacgaatgcggttatcggcagggaattcaggaatgttcaggagtgtatcgggctgcataccgctggcttcgctaatgcagtaaccaaacatttcggtaaatgcgcgattgcactgcacaatatggcgttccggatcgaggacaatcaccggtcggtcgagatggtcaacggcaataatcaattgtcgggtctgttctttttgcgccatttctacgctggcatcccgtaccagcgccaggtaataaactttcccctcggcgctcactttgcttagcgcaaaacgggtccagattttactgccgtcttttttctccagctgcagctcccgactcatcccctcaacacgcgctttaccgccttcacggttgtgacgaatgtattcaggatgcgcaggacgcaaatcccgcggaatcagcatatcaatgttattgccaatgacttcttcacgtttgtatccccagagcttctctgcggcggggttgaaaaacatcacttcatcattttcgttaattaacaccgcacccatcatattttgctcaagggcggggaaaaaaatgccatcggcggcattatccgcatcggttagcttcatgattacctctgcatcctggcgcatttaaagactggctttccagagttcaacacggtttctacctcgtcttttggcgatatacagagcttcatcggctatttgaatgaggcgctcatagtcaggatgaccattaaacatggcggcaccgatggaaagactgagggcaatatcttcgccgtttgcggctttcagtttggttttctccacccgactgcgaatacgttctgcggtacgtaacgtttcgttttcagaagcttcagtcaaaacaatgataaattcatcgcccccgtagcggaaaacataatcactactgcggacgttgtcataaaaggcctgagagactttacgcagaatttcatcaccagtgttatggccccacgtatcgttgatctctttgaatttatcaacgtcaataatcagcacactcagcggtgtaccggtccggttggcatgggcaatttcgcgtttgaagatagtcggtaggaaacggcggttaagtaatttcgtcagtacatccataccgacttcgtggcggcttacttcttcaaacaattcacgcagcaaggtaataatttggcttacggtatttcttatctgtaataaaaatttcacccgcagacttctgttattcaaatttctggtgttacgcatggtttgattgaaaataccgtcgaaatcctgaatcagacgggagatatggcctacttcggcaataccactaaaataatgtcgacctttatggttaaaccacaggccaaaatcagcctggcttaaaggcaaactactgcctaaatcagaatccagcaggattttatagataatatctatttcccaactaagtatactggctatttgccgttctttttcttcttcggcgttttccagtaagctgaagatacgatagttttcatcttccttactggcactactgtcactaaaggtaaacgcgcgagtcatcacttccatcgcgatatcaatactgttaatgctgaaatggtagacctgaagtttttctgcggcggaataatcgctagagaagatcaccggatagaggatttttttcagcacccgaaaccccatctcgacaatttctaccggaattcctatgcgggcatgcacttccgcgacggtatgctggatttgtattagcctttcgacatcgtcaacctgggcagaaagcacgttaataatccagcgttccatcgcactcttcaactgccgctcaacttgttcattactcaagaattcttcggcatgcgggtcgatgcggacaattcgataaaactcgatactcagataatgagcatgcgcaacggcaatttccgcggctttagcacgaatgggcggatctgcctgttcgacaagtccggtccactcatctttcattcttttaaaatacatctccataattcacacccttataaggctgggaaatcagacggaatcaaaatgaaacgcaacgtgcgagatcgactaactgcaccatattctcctgaaatatgaagatatactgaaaagaaataagcgatttaggacagtttcaatctacgctactgttcttcagaagagtatagcccatcgtaattatttttcggtgacagcgaatatcgtatggtttttcatattcatacatttttattagggatttatggctgtttaactaagtgtggttaatttgacttaagtaagcatgattattagtgggatagtttaagagggtaacaagccggtgggtaaagcaccggcttgttacaaagtaagaatgggagtttaactgccccagcgactttgcagatagctgaccgcttgttgagtctgcggtttattcagatagtcctcacggaacaagatggtgccgctaatttcgggcacagcatcgttaagatcgagctgctttttcagttccggtacgccgccgttaatcatccagtctggctctatcttactaggttcacccactttatagaaggcgataccgatatacaggcgggtcctggtcggtttaacgacatccgcccaccattttgccaacacgtcataacgcgcggcactccgactgaacggccagtaaatttggggagcaatgtaatccagcaatccttgttccacccatcgacgggtgtcagcgtaggattcgtcataggctgccgcgcctcgggtatcggaaccgagcggatcgtgacttcggttacgccacacgcctgccgggctaacaccaaattcgactcccggcttaatgcttttaatggtgtggcttacctttgcaattaactgctgagtattgttgcgccgccagtctgctttactcgcaaatgcgcctccgtatttacggtacgtttcgttatcatttagccgactacccggactctccgtatagaaatagtcgtcaaactgcacgccatctacgggatagcgggaaaccacttctgcgactatacttgtgatccagtcctgaacctcagggatgcccgggtcgaggacaaagcgatcgccagacgttctgatccagtcgcggtgttgcacatagacgctcgccggttgttgagacagagtgctattcagttccctgatagtaccgggcttcgtattaacgcttacgcgataggggttaaaccaggcgtgtactttcatcccacgcttgtgggcttcgtcgagcataaattgcagcggatcgtaacccggattttcaccaatcttaccggtcataagatcggaccacggcaaaattttgcttggccacagggcggtaccgtccggcttgacctggaaaaagaccgtgtttatgccgagacgttgcagatgatccagtttgtcgatcatcgcctgttgttgtacacgggcccggctggtggggttactaatgttaacgctggaaaccggtggccagtcgagccgagaaaccgtggccagccagatgccacgcatcggttgactgctttgttgcgtcgtggctggtggcttactacctgctggtggtgtcaccatggactctggaggcgtgcttttacaactacacagtaaaagtgccagtgcaactagtatcgctggtcttctaatcgttaatttcttgtttcgggagcagatatccatatgtgctggtttccggtaaacagatgtgcgctcattctcgtacttatccccgttaagtcaatacgacagcaagcacgaaaaagggagcgatgaattatcgctcccttgtcttataaccattcagacatggttagtgtttcttgtcattcatcacaatatagtgtggactacgtgcacgcgggtgcaggaagaagtgaccttttggtgcgttctgactgttgattggctccagagtgacgccggtatttgctttgcctttacgatcatgaacagcatagagaataaagggcagggcaagtaccaccaggaaactaacaaccagtaattcaacatacatatcggtagaatcaccctggatgttatccggcggcaggaaggaaacaataaacgccataatactagtcagcagaccgacaattgccacgaccagtttcacccctttaccaccagggatattaaatgtgcgttttaagtcaggatgtttaagaaccaacacaatgtagccaataaacagcatgaaataagcacacagataaatcaccaccgtcagcgccagtgcgatcaggaaggacatgttgttaccgccaccggtattggtgaggatgatcaacgcgatagacgtaatcaccagctggctaatgaccagcgttaccggtacgccatttttgttcattttagcgaatgccgctggcagcaggtttttctgcgctgttacatacatcccgcgagaaggaccaacaatccaggaggcgatttccgccagaacacccagcaacagcagtgcggagatcacgcgaaccgtccactcaatttctggtgccacatgggacatcagaacggtaaaggtttgcattacccctgcggagaggttgatttcattacccggaatgaccatcgcaatagacaaaccaccaacagagcttaagcagattgccgccaccatcagcagtaacatagccaacggatagtcgcgccctgggttgctcatttcattgacgtgggttgcggatgcttctacgcccatataactcaaaatgaaggcaacaaatactaccagggtgcccactttagagaagtcagggaagaaggtcttgctatccatttcgatagcaacgggggcaccggagtgcagataaatagccgctaatgcgatcaaaataaatgcaggtaacaggataccggcgaagaagccaactttagcaattcgcgccgtgtatttcgtgccaccaaactgcgttaatgccagcgcccaaagaatgatgagtgctgcaatagttttggtaatggggtcttcattcagcgctggccatttcaggatgtaggagagtgcccctaacacgaaatagagcatcggaataaaaccaatggcgatttgcagatagccaaaactgatcgctgcaaatccccatctcggccccagagtattacttacccaggcgaagacaccaccttcttcccagccgtcgacggtggccatttccgcagcacaaagtcccacgggaataaaccataaaatcccgcctaatagcaggaagaagactaaactaaagccgcttgttgcgaaggtagggtattcataaacagccattaccatgcttgccgttatggcaaagaatccaagtaatgtgagctgcttagctttacctgtctgtacacttgtagccatattatccccctaaaacggtattcctgtcggaaccgcacctgttttgttctgaagcgtattcagaacaatattttccgttgctaatgccagtgaacagactttggaaattgtcccgaaacgggttcgtttcgggacaccgttaccgttaaacgttatcaggtatgtttaaagctgttctgttgggcaataccctgcagtttcgggtgatcgctgagatatttcagggaggctttgtagtcttccagcaacagttcagcaaagtccatttcgaagccgcgacgacacataatgcgcatcaccacgatgtcggtggcttcaccgccgagagtgaaggccggaacctgccagccgcgcagacgcagacgttcagagaggtcatacagggtgtatcccggatcttcaccatctttcagtttgaagcaaaccgccgggatgccttcgtccgggcgacccgtacagatgaactcatacggccccagtttggcgatttcatccgccagataagcggcaacctggtaagaggcgttctgtactttggtatagccttcacgaccgaggcgcaggaattcatagtactgtgcaattacctgacccgccgggcgggagaagttgatggcaaaagtaccaatttgaccacccaggtagtcaacgttgaacaccagttcctgcggcagcgcttcttcgtcacgccagataacccagccgcagcccagcggagccagaccgaatttatggccactagcactgatgcttttcacacgcggcaggcggaagtcccagacgatatccggggcgacgaacggtgccaggaagccaccgctggcagcgtcgatgtgcatgtcgatgtcgataccggtatcggcctggaatttatccagcgcatcgtgcagcggttgtgggaactcatagttaccagtgtaggtcacgccgaaagtcggcaccacgccgatggtgttttcgtcacaggcttcaatcatgcgtttcgggtccataaacaactgaccggggcgcatagggatctcacgcagctccacatcccagtagcgggcgaatttatgccagcagatttgtaccggaccgcacaccaggtttggtttatccgttggtttgcctgcagcttccatacgcttgcgccaacgccatttcatcgccatcccgccgagcatacaggcctcggaagaaccaatggtgttggtgccaacggcctgaccatttttcggcgcaggcgcatgccacagatcggcaaccatatttacgcaacgcaggtcgatggctgcggattgcggatattcttctttgtcgatccagtttttgttaatggataaatccatcaatttgtggacattttcgtcgtcccaggtctggcagaaagtggccaggttctgacgagcgttgccatcaagatataattcgtcattgataatctggaatgcgacatcgtcgcgcatttcgtgcagcggaaaacgtttactttctgcgatagtggaaatagacttcgcaccaaaacgactatcgagtagttcgctccttaaatccgttacttgcttcttatccattttaaactccttaaaatgattggatcgcattaaaaaagtaggatttatcgataaagtaagcaagtgcaaaggactcgtgtttaaataacaaaatcctaatgttatttatcgtgagatattacgcgaataatattttttcattgaaaaacaatacaatatgaaattcttgggtggtggtaaggtgttttatgctgttatttttatgcgcattctgtgtctcctgaattatcacgtaaaaatcagaccttaaaatatcactattagtacttgattattattttgaacgcatttataaaattattacataaaaatagcgaatattgctaaaatccccgccaacgatgtgttgacggggctgttattattttggcaataatactccggtataagtatttaccggatgagaaagatattgtttaacggcagtgttaacattctctaccgtcatttgtttcaacaattgctcctgctcagtccatgctgcaggatcgtcatattgaataagactatttacaatagtgttcgctaattgttgaacgctacgctgttggatatcgaggctgcgctgaacgttttgctggtattcattcagttcttgctcactgatccctttagccagacgcttaaccatcacttcattcgctaacgttaacagttcatcatgtcgttctggttgacaagtaaaagccagcaaatgactgatatctttggcctgaggatcaacgctgaggcgagaagaaacgctgtatgctccagatgcctgttcacgaatattaacacgtagatcttttgccagtgcgacgttaaaagcatcgagcgccatacgcgtcggcagattaacaggtgtccgggaatcataacgcttccactgactaacctgtgccacaggttcattttgttcttttacagtaacgcttgcgttgtccgtcgcgcgagttaatggtttacctgcggctaatgggctatcagagtgtttgatacttcctaagtaacgcgtaattaacgccacgagtttgtcttctgcgacattaccgacaatgacaaacgtgatatccgctggagaactaaacaattggcgatcggcagccagcgcatctgcggcagtaaactgtgcaatctgattttcttgcagtaatttcgtgcggtcatcagcatagcgcgtctcatacatctgctgggcgaatttctccgctggacgctggtcgagcgttttcaacgcctgaatttgagcattttgtaggcttgcccaaatattatcgttaatcgtgctgtgggtgattcgctggttaatcaactgaaaaccaggttcagggttattagtccgcgcgctaacggagagcaacgtattcatgccactgactttactgctcatggttacgctattttccgcactccagcgtttcaggctggaagaggagagttcgccaacgccgcttccgctaactgctttatttgccagcgcgataagacttttttgctgcgcagggaaacttaaatcgcctttattgcttacggcaataatttgtagcttttgctcttcacccgcggattttgccagaataaccctggcaccattggaaagtgttaaacttgtcagattctccgccagcgtttctttgctgctaatttccgcctgtgggtctgcgtctactgttaagcttaaatttctgcctgggaagacgtaagccgccagctttttgttggcgtactccttttccagcgccaggatagccgcaggagacaatgcttttttggcggcaacctcattgtttaccatttgctcccaaaatgcgtcctggttctttcttaactgctgccatttttccgccagactttgcacggtaatttgctgccacagacgtttgctaagttgatatgtctcttccgggctcaagaacggcgtattatttaaactgctggatgccaggcgactggtcagcatacgtaaatcacgttcagcttgctgatcaaccgcatttttcagccaggtgaggcgggtagatttgacatcatcgagttcttcagcagaaaaaccatgctgatcaatggttgccaactctgccattaatgcattcgcagcatcctgcatattatcgtctcgtgcatttacacggaaaaacaggctctgataatcgggtgcaattttaacgctgcgcgcagtgccgccagaaatagtcttcaactcgccgctctgtatgcgttcctgcagacgttgattgaacagctgaactaacatgctccattcagcttgttcgataaagctttgctcatcgttcacttgtaccattggcaggcgataatagagtgcgatgccgttcacccggttttctttatcattaatgatattaaagcgcaggtggttttcggcttttgtcggccagacgcgattttcagctgctttgttagccggaagcttacttaaattatcctttatcagcgccagcgcttctttactgtcgatatcgccgaccacgataaaggtcatattatttggttgataccagcgttgataaaattggcgcaattgtgccggtgtgaccgtggcgacagtatccatcaggccgataggttcacggtctaaattacgggtatttgccagcaggaaagggcggcgcgcctgagaggtgcgccatttcgcatcctgatgggcacgccattcctcagtaattacgccacgttcagcgtctacttcgagtttttcaaaggttgcggcattactccattcactgaagattgccatcacttgttgcagattttgtttctgcgtagtcggcaaactcacctgatacaccgtttcgtcatagctggtataggcattaacatcgcgaccaaaacgcaggcccatactctcaaatgtttcgatgactttattacccggccatgtttttgtgccgttaaacatcatatgttctacaaaatgagccacgccgagctcattgtcttcttcctgcaaactaccggtatgaatttgcagccataaatttacctgatcctttggatgagcatgcggataaatcatatatcgcaagccattgtccagttgcccggtaattaacttttcatcctgcggtaaggcggcggcaatcagccgcccggggagcaacagagttgccactaacgtcagtaagaaacagaggtttctcataattatctccatgcgaaaaccgggcgaatttacccggttaagtaaaatccgaactattaaaatttcatgctgacatcaagccagaaagtacggccactggcgtaggtcgccacaccggtgttcgttgtatcaacagcggttttgctatccagtacattgagaatatcggcactgatcgtcaggttttgttgttgcagaaattgtggcgtccaggacaagcgggtgtcccaggtcaggctgctatccagtttttcgtcaacatactgcttgtaatcactatattcgctgatgtattgcgcatttgtcttaccaaggataatgcgagctttacgcgcttcttgccaggccagcgtattcgcccacactaacccgctcggttgatgcgtgaaatccatgtttaaggagatctttaatgggttattaaaatctgccactggaacgctatcgtaagagaccagattaccgttataaaccacctggttatcaccggtattgctctcctcataaccattgtttaagctcaagttgcccttgctcttgatatagctaaagacaatttgtgggttaatatctacctggcggatatgcaggggttcggccagttcaaaactgaggctgaagctatgcgttttggttttgccatcgttgttatattcagtaatggtggttttagtcgcgctgtcggtacgactgcttttgctgatttgatcatgcgcttcacggtaaacatagtttgcacgcgcaataacgttcttaccgattttctgctgcaatcccattgccagttcatcgttataaggcgttttcaaatcctgataacgcgtcagagttttattaccacttacgctttccgtccagctattgcggatatcacgtaatcccatatcaagaatattcccgccatagtaacggttataacctgctgtaatcatactggtttgattagcaaaaatatcccattccgtcataaagcgcggggagatattgtggttactcagatagttgtcatagtcataccgcacgccgggcattaaactcacattacgccagctaatgcgatccgccatatacagcgtgtagttgtcaattcccaggcggcctttacctttatggtaaatggtatggttagttttctttccggcagcattaatcacataggattcagactggttatggcgttcagtccacgcatcggaatagatgtattccgcgccgaagtagggttgatggctaacattacccacggcgaatttttgccagtccaggcgtgttttgaaggtgtaattatctacagcctgggaaatgtgtcctaatccgccacgggtgcaacgccctgtaatatcaccatatgtacaactaagttcggtgtaccagatgtcatgatcgtgacgggtataatcactaatatgatcccaaccaacggtggtacgcagtttggcccatgcgagctgcgtatccatatcccatgccagaccataggatttattacccatttcgcgatcagactgcgggaaggtgctggtattataatcacggctggagccggtatattttaaggttaaatcgtgggtaaagcggtcgctggcaaaccaggtaaatttgcttaatgcagtatcgataacgtttttatactgtgcccgaccggcgacaatgccgtcattgctaacataatccgcgcgggtgatatcagactggcggcggcttaaaccggcggtaacgccgaagttatcagcgagttcctgattaaagctcaaggtataaaagttctttttaaaatctggggagtaataagtacttccactagagccttgattaaatgcgctcttgttattctcatcgatatggcttgttaaccagtcgctacgcgtagtgcgataacccaatttcaccttgctatcatcagcgttgaagcgtttgatctttgcatcaattaccccgccattgaagcgaccaaattcaaccggcacaaaactgtcataaagcgtcacattgtccagtaagctgacatcaagataatacccctgactcatcccgctaatattggttgcactactggcatcggactcattcgctgggttcaggttattagttgcactaataccgtcaatcaaataggcattctggtaggggctcgcaccgtgaatagagattttctcagggcgaatatctccctggttcaagctggtactttgcgtactatccatgcgtaccgcagggttggttctcagcagatcgctgatattgccattcccggtcggtaaacgctcgatgctttcactggtgtaatgcgtgttgccgtttacgggtacagggacaggagcatagaccgtcatctcttcaaaaaaatgcatgtacatgtttttgtcatcgacggcctgcgccacatcagcgccacataaaatgacgccaggaataagaactcgcttcatttatttatatctccgtacagcagggcttttattgtttttataaaaccgcgctaatgtcacaaatatcatcggccaggttccagacaccgggttgatgtgtaaccataatgacgccgcttgtgggtagtttttcacgcactaaacgcagtaagcggatagcctcttgttcctcaagatgagaggtagtttcgtcaagaaatatccatttcggacgtcgtaaaattaatcgtgccagggcgatacgttgtttttcgccgctggaaagaatatctccccagcgatcgtggtcatgaatacgcgcagccaatttcccaagaccaacctgatgcagtacttcgctcaagcttttatcgtctacgggcaggggaagtgctttacaaataatctctttcagtaagccggttttgattaacggtgtttgactcacataccaactgtcagcaggagaagaaatatcacctttaaaccacggccagcagtgggataatgttttaagcagtgtggtttttcccgcgccagagtagcctttcagtaatagccatttgcctgggctaacatgaaagttcaggttctctaatatgatcttattatcaggcgtacgaatactcgcatcagccacttgtaccgcatgttggcaatttttaggcttattcgtagggcgctgttcagtgagttgatggaactcatacaagcgatcgataaccgcagccagttcagcaagttcgtcatatttataaataaaccagcttaaattgttgcttaccagcataaatgcctggcggcttttcatcagtccgcccagattgatctgcccgctaataaactgcggcaataacagaaagtagggaagaacgctaaggctgcggctataaatattctgccagtaatcaagccaccgctgacgattcattaaacgatgccagttctctttaatggtatgaaaattgtcgctcaactcctggcgttgtagagactcagcattgcttagcgcaatcagttctgcctgcttattatgctgcacaagatttgttcgaaatgtcgcttcgctacgttgtttttccacattaagcggacgaatacgtttacccaccttatgggtaaataaagttccaccgatcacaatgagcacgacggtatagaccatatacccctggatattccattctgttccaccaacagtgaaactgagcgtacccgcgctttcccaaagaataacggtaaaggtgatcagcatgctaagactctggatgaagccaaaactaagactgagcgttttgctgatcagtaagagaatgtcttcagcgatacgttggtcagggttatctgtatttttatgctcgccgtagatctgcgtgaagtagtagtttttatctgcaaaccaccgattaaggtagtaatctgttaaccattcgcgccagcgaatagtcagtagtttaattaaccatgttttgtttacggatattaatacaaagatccccagcagggcagggaaccaaaggacaagctgccaaagcttatcggtttctttctggcttagcgcattgaaaaaatcattattccagtcgtttaaccagacctgaattttaaccacgccaaggatcatggcgaggataataatgattaacaacacactagttttattattcttacgcagccaaaagggcttcaacagacagagatactttgctatcaacatacgaagcgtaatgggaatggttatcattagcgaaaattgattgtgccatccaatgattatctatggcaatgatttactgatgaaatttatttaagtatcatttaacaatatgaaatataaaggaatatttcattttcagtggttatggttatgctattgataatcaaggatattgctaatgccctgatgcataccacgtaagccaggattttcgcaagggaagatgatgatgacgaaacacccgacaggaatttatgtcgggtgccttgttaaggtcataagaaggaggctaagaatggagttaaaagagagcgttattaattattctccatttgttttgcaacatccataatgtggtaaagcggtactctgttcttagctaactctaccatggcgttcatataaggtaccatggtactaaaaaggattttataaccttcgcaaaaataagaaacagtctcattgtttactttagtaatacgatgcttaggacaaccgccattgcagataggtttatatgcacattgctgacatttcgctggaatccgttttttttgcgctgtcagttgtacactgttcatcgttttgagttcagatttattaatgtttccaattttgtactgtggatagacaaaatggtcgcattcgtaaatgtctccattactttcaacaaccagattatccttgcaggactcctggaaaatacaactggtatgcccattccccaaaaaacggctgacaaagctttcaaactgacggatgaaaatttcacccacatcgtttttaacccattgcataaaaatggtactcataaacttgccataagccgtgggaggcacagaaaaatcaatgatacggaatgtgttctcactatgaccactgaaatcaatattcggcgtcccggtttctagcaattcgataaattgcatatgtttactgccgatagattttaaaaaatgataaacctcaagagggtaatggacattaacgttattaatgacggttaacgtattaaactctacttgataacttttcagacgctcgatggctgctatcacttttgcaaaagtaccgttaccactattactgcgtctgtaacggtcatgtaactcctgggggccatcgatgctgataccaaccagaaattcatgttctttgagaaaggcacaccattcattattcaataaaatgccattcgtttgtaatgcattaaaaatacgtttttggcctgcatagcgttgttgatagtgaataactttacggaaaaaatccaggccagccagagtgggttcaccgccttgccaggtaaaatagacctgattgccagacgctgcgatatattgtttgatgaactctttcagagtgctgtcatccatccatttttcatgagtaaactggctctctttttcaaggtaaaaacagtaatcacatttgagattacattgaaaactggagggcttggctgtaacgtgcatcgctatctcgctcaataaggcggcggaaaaatccgccgcatgaaggtttagttatttcgcttcgcttagtgctttcttgatattgttaaacttctcctgatttacctcgctaagcggtggctggctgctgtcgataaactctcttaccacgccttgcatctctttaacgacctgcggattggcggcggcaaggttatctttttgctgtagatccgtcagtttgtagagacctaactgattgttttctactgtatagacaaggctataatcgttatttctcaccgtataagagaattggcttaagtcctcagtgttggggttatgcgggtaatcgtcactctgatggcgaacaaatttgtggtaattatcccagaatggaatattttcctcgtcaaaccagtgagaataagaggttatccaggtcagatttttatgtggctcgccttgtttcttatcttgcaaccagggcagcaaggaaacgccatccagcttaaggtcttttggaatgctgatatcggctgcatcaagagctgtcgggtagaaatccattgcggaaatcagcttgtcataattaccgggttgaagttttcctttccaccacataaacattggggtgtgagtaccgccaggataggtctgactcttatagcctttttgcgccccgttcagcggcagaggaccatcgataaccgcaccattatcggaggtaaagagaataattgtattgtcatactgtccgtttttcttcagttgttcgagaatgcgttttacaccctgatcaacagaataaacggaagcgtagtagttatctgctgtttgactaccggtattaaattgcttctgatattgatccggtgcaggattatcatttggcaggtgcggagcattataagccaggtaaagcataaaaggctggtcaagtgttttggcacgatcaacaacgccaattgcctcatcggttaactgatcgctgatataaccttttgcggggacacgttcacgatttttgaacagactaggggagttgtaatatgccgttcctgcagcgtggaatcccataaagtaatcaaagccacggttttgaggttgccattcttccgcagaaaatgtggtgaagttgtcatgatagtcacgcgtttgtttatcttccggtaccggcacattactgattttactcaagtgccatttacctactgctgcagtgtaataaccatgattctggaataattcaggcaagaaagtttctgttagcggaataccatcctgagcatcggtattggaatagacaccaaagcgggcgggagctcgaccggtcattattgcggcgcgggaggggccggaaacaccgtgtgccacatagccgttagtaaaacgtacgccttcatccattaaactaaggagcgtcggcgtacttttttgtgcagcttcaatggctttatctatccctattttgtaggtatcgacaacttcacgattttccattgtttttgggtcaaaagatcccttatcaaaaggaagttgtccataaccaagatcatccatggtcagtacgataatatttggctttcctttggtactgtattctgtcggcgtaaagtcactgaaagcaacgtttgttttggttgctttcagctttacatcatctgccgcatgagcagcaaatgcagccataccagatgccagtatcaaagatatgctggtacttacgacacttttctttaatgcagacttcataaatgttcctcttcttattgtacttaattccaaagtaattttacgaagagaaataagtggatgtaagtgaagttagtcacataaagagatagcagatttagctaaaaaaagggaaaaaacagtccataaagcgttgacattactttctgttctattaagtaatttctcgccgataaacaactaatttattgatatttaataaattattgcattttactgacaaaatgcagaattgagatcataaataatcatgcaacaggttatgcaagtgcataaatatgtgatggatgtcacttatttatttcaataaatatatcgcctaaaaacaacgcggggcagggaatggctgccccatttaattcttacgcagcgtgtgtggttgactactcgttagcaaataatcaaatagctaaagcattcatcgtgttgcccgtattcatacccgtgtgactttgacaacggtactccttagaaactctcttcggactgttgccgaaatgtttgcggaacgcataaataaaataagatgtactggcataaccacattgttcggcaattttattgacactaccttctacgcgtatcaaattttttgcgtgctgcattcttgcatctaaaagaatctgactgaatgtcgtttgctcttgcttaagttttttcttcaacaggctttcactgatgtacaggcagtcacaaatatctttcagcttccatgggtgcgccggcttcatgttgacaatatttctcactttcccagaaacggatagcacaccgttagttaatagtgtaatgaaacctttgcatgcggcaaaaatagacaggcaagaaaaaagcaaaagttcactaaaattatgatgattgcgttcttcgctgttgagataagcaatcatttcattaagcaatccagtcggtacattactagcacgtaaaaacttcgcaggaacaggcaccgtcactgtctggatgttagtgcattgtagatattttttaatggtattttcagtaaatccgatctctttaaaatgccgctcataaggttcaaaatgcgtacgaacagcgttatctaccatcaggatctcgccgtcagagaaggcgtaatctttatctaaaatgttagcgttgaaggcatgatgaataaatataacagaacaaacgaggctcattttatctccttaaaacaataaagtttttatcgatacttttttaacatttcatatttataatttgctgtttgttttcagccttgcaaactattgataatgaaatgtgtaagatctcttgcaatgcgacccatttctgaaatactcagctgatcaattgccgaaaaaatggctatcaacgtaagtgtcagtaataagacaaccacaattgcagacatgatttctttatagttgtctctttgcgtgattttgtttttcactgtggtcgcatgcatttcaaatatgtttatttagcggataacgttaaaaatcgttaatcagtatgcttaatataacaggctggagaaaagaggaaataggactggtgcttcagtactgagcggagtttcttacagctgtaggcagaagtttatatcttatagtatgtagtttaatttaatccatgtgagcaaattgcgaaataatagtcaatgaggaattcttctgctgtgcggatgacagcagaagaaatgagaagaggcattaattacttggttctaattcaaccggaatacttttatagccaggaatgccacttaatggatcgtggttatcaagtgttagcatgtgattgctttctggaaaataggtcaccagactgcggtcagccatagggtaaatgaccacttttaatctatccatgcggcgactgctgcgcttaccgtctggcgtaagcgcaataagattaactctttcgccgttttttacacggcaaattttagcttgtttagcactcataaagaccacatctcgttgaccgaatacccctcgatagcgatcatccataccataaatcgtcgtgttgtactgatcgtggctgcgtactgtcgccatgaccagcttactgttaaacgcactagagggatcttctaacagccctttgctggtaatgaaattagccttaccactcggcgtcatccagcgcctttcagcagctgcatttatcaggtgaaaaccaccgggatgacggatgcgctggttatagtcggcgaactctggcagcacagcttcaatgtcattgcgaatgcgatcataatcttccaccagatactcccaggctaccacgctctggggtagtgctgcctgcgcgattcccgcgaccactgcacactcacttttcagcattacaccggcgggttttaacacgccacggctggcatgaatcatgctcatactatcctcaacggttaccgcctgcgcaccgtttttttgcatgtcaatctcgctacgtcccaggaccggcagaatatagctatgccgtgcggtcaacagatgagagcggttaagcttagtggctacgtgtaccgccaaatctaattgcgttaacggtacagcgctcgcttcccgatctggcattgccagcgcaaaattgccccccatgcagatcaatgctcgagcctgccccgtacatattgcttgcatgctggcaattgcagcatgtccaggtgcatgaggtggggtgaagccatagcgctcacccagacgagccagaaactctgcagacggtttctcggtgataccgacggttcggtcgccctgtacattagagtgtccacgtagtgggcagatacccgcaccaggcttgccaatgttacctttcatcaacagcagattgaccagttgctgtacgttctgggtaccatgttcgtgctgagtgatccccattccgtaacagataatggtgcgttcggcagcggcatatgcgtcagccagttcggcgatttgtgtctgacttagtccagaaatacgttcgatatctttccactcggaattgagaacgtcacggcgtagctcgtcaaagccgacggtatgcgtttgaataaactcgtcatcaagcaaactaggccgacctgcggcgcttgcagcatcatcgcgctcaattaacaggcgcatcatccccttgagcaacgccatatcgccaccaatgcgcacgttatagtaggcactggccaactgagtctcagagttcgtcagcatttcaaacgggttttgcggtgcggtaaatcgctccaggccacgttcctgtagaggattgatggcgatcattttcgctccccgtttcactaaagcgcgcaagctagtcagcatgcgagggtggtttgtaccagggttatgcccaatgcaaatgactaaatcgcacttctcaaagtcttccagcaacacggtccctttacctacaccgatactcgctgccaaacccacgcttgtcggttcatggcacatgttggagcagtcgggaaagttattgctcccgtattcacgggcaaaaagctgataaagaaaggcagcttcattggaagtgcggccgctagtatagaattcaacctgattgggatcactatagctttgaaggcgtgcgccaatttcgtcgaaagcttgttgccagcttaatggcttgtaacagtcgctgacggcatcatatttcaaaggctgagtgagtcgccccgcagcctcaagctcgtggtctccccaggtaagtaaactttgaaccgtattctcagcaaagaaagaggcgtttacctgcttatccgtgacttcccaggcgattgcttttgcgccgttttcacaaatgtcgaaactcgcactgtgcttaggatctggccatgcacaacccggacagtcaaagccctctggcttattcatgtcaaacatggcaataacatcctggcgtatatccatctgcttacgtactgcattcgctacggatttaacagcaccccaaccacctgcagcaccctggtaggattcaatttttttcttcatctacttatcctgtgtggaaatgaattattaggatttgtaatagcgatgatgcacagtacatacaaagggattatcgccaacatggatatataagagtaggggactactctctttctatttttaatctattatcgttaaacaatagattaaatacgataagttaagcatcatctctcatagtgtttaaattaacatatttttcaatataaaaaataagactctggcttcaattgtgcgcggattttcttacaggtgtaggctaatagccttcacaaaataattatccgcgcaattttcgtgaatggagcgcatagactaaggtcaaaatcacaattattcatagataaaagtgacaccaatgacactctggacggttccggcactaaccttgtttcctgtttgtccataggttgcgcttaaacccagaggtactttgcttttatttactgtccccagggagacattttctcccgtagccagtatttttccattacgcattagagtgacacccactccgcttgcttttgttgcatcaggtgctgtgttagcaaacacttgtcggctactgtcagtggtggcaccgctaagataaaaactgagcttttgttcgctactgcaatatacgccaaggggtatttctgcgcttccaggaaagtccgggagatccacggtgacatttcgactatcaacggtgcagccgcctgttggcataacaacattgttattactaataatattccacgtaaaattacgcggatttccgcttcctaatgttgcaattttatacatatgaatacgggcaatgacttcccccgcttttatgacaactccaccggccgccccaactggggtaatatagagttttaacggtaatggcatcggtgtcttatcaccaatatccaatacgttggtatttgtcgtcaacgggaaggggtaggtcacattattccagtacaggcttcctttataactctgtagggagcctgcgaaagcactgccttgtaccaggtttatatgatcagtgtcgtaccagccgccgtaatcattccagcaacttatatgctgagacaagtctacaaccagattctggcccggctgtattacagggtcgagattaacataaacagaggttgtacctgctccaatactactcccgccatcgacattacaactgaaggcaaaaactttgcctgccattaatagaagataaataccgaacaggacctttatactgattgttttacccatgatatatcctaaggttaaaaattgatttaaaaagaaggctaagaaaatcgaatcgacgttattgccaggtgtagatcacattgattagcgcctcgatcgttccctggcttgcgtttccattcaccgtgatagctcttgccttaagtggaaactgtgcattacgagtgatctcatcaacaataaccgttttgctatcgccattttttaacgcagcatcctggtcatccctcagctctatctgaatattttcggcagtaccttcatttttgtaataacccgtattgtcagtactacctgtcacgattgccgtcactgcacttgtttcaaccggacaatcggttaaactcaaagtaatattgtgccagccagatgcagaaccaggttgttgcagattgcgcgtataaagatccccgagattaacgttagcttctttggtttgaatagtgcagggtttagcgactacccgaccattaacagtgatagtgacatcggcggcctggagagttgctgtgaataacgcgcaaaacgtagctaacaggaacctcttgtgaagtcttttcatatctgactctgattattgaaattcaagggtaaaggttgcgctagccctcaccagtcccggattgacggacttctgagtactcttcagacgagcggagtaaggcaaaatattgttctgttctggtaccagtgggatccactgcatcccggcatgaagatcattcagtttcaccggacgcatatttgcgtccaatatttctatacccaaaccggaggccgtattgcttccttcatccagtttcaacaaagtattattttctgcatcctcaataccgttaaatgcaacccgaacccccgttgtccctttgctgcattcacttaacgtaatctgaaaagggacggctggacttgtgctaccggtcgttggaaattgtctggcactgtttttttggagatctacggtaaaattaaggctatcgctactgactgtgcagccataatcgaggacgcgcccgctaattttaataacgctatctgcggataaagcagaataggtggttaaccccagacataaaccgaggaaaataatgttattgtatttcataatctattgttccttagcgacagattgctgtctgctggttcagtaaggtaccaggagaaacttcaggaagcttgtactcgacaatacagttactgtttttatctttgccccaactaacctgtaattgcccactctgtggaagtccagtcagataaacctgaccattttccgcgacaatgctgccatttttattctctccgtgtgtgacaattgcaccgaatggaacgctcttattaccgtacttcaacgtcattaatactttcccgccgatttgtgcattaaatgttgctctggcaatagcaccgtgagttgggatgacagtgaccacggtttcatccagttcaacattatctgcaagggaattcgcgttaagagcaacacggttttctctatattctgtcgcaaatggtaatatggcatagccacgccagtcggtatgaattccggtctggttctctattttgacattatcagcaccaggagccttaaccagaaccattgtgtcgcccagcggctgtccaaaggtgatgccatcagcatgagcaataatcccaccactcattccgtaataaatctggctgctgtcaccactccgactgtaaccgacattagtattaccataagctccacgataattaagagaactgtaaccactggtgccagagcttgtattacctccgtgggtgttaccgacctgaacgctataattcaggttattatccggcagcagagtgccataaaccccgcttagattggtcatgccgcctttcaaatcgttactcatactgtaactggcgttactattacgaaatgcgctctgactgtctgtacgcatccaatgactgaagggaacattaagcgtaaaagcgagtaaatgatcccgatcgttttgccatatattattggaatagctgtaattcaggctagtcgtaatatcaccaaacggcacatttaatccaaaacttatttgctggtcgctgcgactcgtgttccagtaactttggcgactggcactgaaaaatgtcgtaccgtaatttccaagctgctgagagatgcttatttgttcctgaccacgcttactgtagaacagattaaaataatcaataaattgtgtctgctcattggtgtctccggtaggaggcttgacggtgtaaccactcattcgactgtaggcactgtcggataagttataaaaaccttgcgtagaatagcgatatcctgcgacctggatattggttccacaacaagtttattgctgcacttgttgaagagagtatttgcaaaaacattttatgtcgctaaataacatgacgatttcattatgcatgttatttataaaccgtgactaaacagaatattattgcgaacaagggaagtgtcaggaaaggtcaagagctaccaatggttaatatggctataaatcattagctatggttaatgtttgcttgctgaaactaacaccgaattgctctaaacagataagtgcagggtttattaaagctgtccgacagactttcttaacctggtaatatctctcttgggtgactctccaaacatccgcgaatattcccgacactaatgggatagctttcgtaaccgacagcataggctgctgtggtgacatcgtaatgttcattcagcatctgtcgcctgacttcattgagacgtagccatttctgataccggagtggactcattcccgcttgatccgtccttaaataagtaacagcaccctctggtgttttcgtatgcagtgtctatgcgacagacactgcgctcttagcatggggcagggaataaccaggctatttctccatgcacaggccaattatgaaagaggagaggcttaagttcttgaaccctgaacgaataacgactaccagaaaagcacttcgcatcactcagacatgatttaacataatatacattatgcgcaccaatataaaccaaggaagaatccagtcgttggcggtcatgattgtcatgctcattaacaatgaccaaaccccatatctcacttactaccgtattctcggcttaaccgtccatgcaacctcaacacattgctttcaactgccgtcaccacgttctccggaaaatctgtcggtaaactagtcttcacgttatccagtgctgctggaatcattctggcaaagtcactcaggatttcatgcatctgcacttccgggaatctcagcacctttgctgtcgccaaaaaatgtcgcggataaattttatcgattgccgtttttttgcctttggatgcgttaagccccattgccagtttgagatcgctgatgtgtattcccgtaccgccaaggaccggaaatgcactaatgatgtcgtaaaatggcgtgagtcgataactgccgccagcctgaataaatacggagaagttttttgcatgaccgtccgttgcgccaatcaaccactggaagacctggaatttcataaaatcatagcgatctttcagcgcctcgctggaccccatcaaaaaagccatgatccgcgcgatgcctgggcctccatcactttcatatttcacgctactaggtaaaccgaatgtctgacacatatcctcctgtggcaagcgaagtaaaaccgttcgctcagcattccaacgcctgtcaaaacgttcgaccgctaacgcgcgcacatttcccgctttaatgatttctgcgtccggaacattcaacccaagttctttcgccagcagcagacagtaatactcattatcaacgctttggctgagatcgagcgtcgcattgggctgcctgatttcgccaatcggtaatttaatgatgtgcgtcgtcggcgttattcctttcggaatgcaccagtcattgcctattctgagcagtgctgtcttctcctgtgcgccagcaacgctgatgcgaaagtcattttcttctctaatcatgcctagcgggatatctgctttataagccgttaatacttcttcaagtctggcttcagtaagcttttcccatgccattatcggatgcgttacggtttcgtcttcgggtattaacgtcacggcaccaacgctgtctcgccctatttcactcaataaatcaaacggttgtctggatttggcatgataacgtttaacgatccggtcacgtacaatcgggctatcgggtaacaggttatcgaagaagttaaatacggcatcagaggtgatattccccctctgcaatggcaggctaagactcaacggtctggcataacggcttgctaaccactccggtgcatacttaaaggtgtgcgcgccgttggctaacttcgttaactcgcctacccgctggttgttcatccaagtgacaagtttaggcattaccactccagattttgctgttctgtactttctgggctggcatttttcgcgtcgcatagcgtcatactgagttcaaggctctgtaaaatcttaaaaaatgtcgtgagcgtggtattgtcagggttgttttcgaaattggaaatcgtcgcctgcttaataccaatttttttcgccagctcgctctgcgtccagccattttgctggcgaaccagtttcattgcattcgccaattgcgttgggctatagatcttctgaaagctcatcatgtcatacgtccacagcaagtttatccgcttaaggggatattataagttttatcctttagtgaggataagtcaatctggaaacacatcttatccgctctacgggataaacgctgcgatatccgcgatcgcggataaaaaggaggatttaaataaggcgttgatgcgccgtttgaagtcggcaatattaagccgcatgccatctcgacatgcggcttatacggtttaccagctatatttcactcccagcatgccctgagtatcgctatagcctttatcacctagttgcacaccgacattcccccacaggctaaggttgttatttactttcgcctcaaccccggtacgtacttcaccgagattacgcgcaccttcacggcctacggtttgaccattcatcttcacggcgtagactttgctattgttgatccagttcgcttcaatgtaaggctggaactcacgctgtttaccatcgtcacgctggtgatggctgttcaggtaggttttcaccccaagtcgcgtttgcacatttccgtcgccttccgtttcaatgcgcgttccgtctttccgggtatggtcggaatctttcacacccatccaggtgatttgcgcctgtggctggacgtaccaggtattcagcgtcccttcgctgccgctaaatgttcccgcttcaaaggtatacccaccctcaacagaggccgtcacaccgcgagaatcatagtcgtcagcagaacggttatcggaactgacgctgttatcaaaccagttatacagcgcccagctgtcaacataagcgccggtcttattcgcatcgttctgataccaggtcgcgtacagcccagcgctgtaaccgctgatgcgcccatcgcttttataacccacacgattactctgagtattactgtgctgattggcgtagcctgccatcacgccaagatgccagcgatcctgcgcgttgctactccactgcgccaaatcgccgcctagctgcaatacatagcggttagcctgagtatttagctgaccgtcaccggccctactacgttcgtgccctccgacatgacgcatccacatactgcttgcgctcccctgagaatgcagactatctgtatactgcggctcacccagacggtcgtgtaaacgatggctaaacaggctgttggctgcggcaatgttgctgatatagcttccggcctccgggcgataaacacttgggccttccggatccacaacagggggattattgatgggatcgggtgtatccgctggcgttacgccgtcccatttactggtcagataccagtttttctcgtcattccccttccctttagccagcgtgtagacgtaagccccagcttcgacagttccggtggtcagcgcgaagttacctgcagaattaccgccaacctcaatgagttcaataccgttgaccgtttgtgcaccgacgccgccaatgttatcaacccgaacgcgagtgttcccttgggtatcgcctttcacgttcatcttatcggtggggctattatcgccgcccagcgtcgcgttgaacgtcatcaggccattgtttccggtatagttgccgttaacggtcagtacattccccggtttccccccttcgctattcatttgaaccgtgccgccattctccaggttgccgccgatagtggttttagcgacacgcagtgccccccccaggcataacgttcatatcacctgcagtggtgacatttccgctcatcacaccgctgttatggatattaatgtgttgacttgccatattaatggcagagtcggaaccgaaagcaatttccccccccacgatatccgtcgtaccctgatatgccgcggaatcgttgttaagagtcaggatcccggtacccagttttgtcacatcaccgctaccgctgatactgtgcgtcatcgcccagctacgctcagtggagatggtgagcaggccattattgataacggaagcatcacccaggtttttctgctcgttgacgctgagcgcgctgcctgtatcaatgttgaattgccccacaaagcggctattatcgccatccaactctacatctgtcctggcggttgcgctcacgatacccttcccgcttatgctattacgcagttcgccagtcacgttttttagcgttaacagaccgtcattggcaatatttcctctgcctaacccctgagtattatcgaggctgacttccgcatttgggctaatgctggttaacgcattgtagcgtgcattaagcccctcgatagccagcgttccccctgtaacattcaggtttccgccacctgtcagttcaccctgactgatcccacctttatttaccgtcagcgccccctctttgaacaaaacagtgctacccatctgcccggtgaatgtctctaccgtctgcgtgcttccattaagatcgacgatggccgcgttgctgatgttcagttcccgggtgttgccaagtgcaccatccgcatcggtacgtaatgtccccatctgaacgtaggttgccccctgatagtcgttctgaccgttggaaaggctaacctgtcgcaccgtattgattgccagatccccttcaccaccgatttttgcgctcatatcggccgttgcgccataggctccgccatgttcggctaacgtcagcttttgcccaccatggatgttcagcgctttcagcccatagttaacgtacaaaccattacctggtgcggtcgtgaggcggaatccataatcaccctcggcgaccaccgttccgttttgcgcaatgtgtaacgttttgtccgcttccacctcgtcgccctgtaaatcacgtaacgttaaactgccaccgctcccaataaccgtttgcgccttcaccagttgaacgccgacatggctatcgtcgtgttccagcaaattgagcgtcgtcagagggttattcgccatgggatcattccacggtttaggcacgtcgataagcacgtcgcccgtcccgtttacctgatagttacggcctttccaggtgtagtcacccgcgccgacaaccagcgtatcgacgctgatatatccctccgcgagcgtcgcagcaggaatatccgtatcgaaaatgatggtacctccattcatggccagtccaccaatggattgctctccaacttttacgcttgtggtattttcactgtcagactgcaacatcgcgtgagtaagcgcagcggtgttgtcgcgttccagagtgaaggtactgtctttcagttgggcaacaccggcgaattcagtccctgttgcatgggtaaagccaaacatcttgtcggaggaactcagctgcactcgcatcaagccatcgcctttgagcgcattggtcagcgtgtaatctcctgcactgttcgtacttgcgagaatgtcgagcgtaccggggtttgcaatggttacttcactgctccccatgcccgttaccccatctgccgtatgagacgcaatggtcaggaggccgtcattgaccagcgttttaccgctataagtattccctgcattgaacaccgtatggcctgcatcatggatcacttttccgtctttatcgtcacctgtaatcagcatatcgacctggtagccggcatcactgttattggtatgattaaagacaaaaacgccttcgccaagaccaaactccactttcgtcgcattggtgataaatccggcatctgccgccgcctcaccgtgagcagcaccaatgtttagcgttcctacagcaggctcaaaaacacctaagtaaacttctccaccttcgacattcagcgtaccgttattcgtcagggttaacgtacccgtaccagatgtccctacgtacatattgaatgtttcaagaagagagttctgcccatccaccctcacgtcgcccttacttttgtcattgagagctatctgtgtatcacgcgctttaactatacctccggtggtaatattcagttcacccgtgcctaatacaccgacctgtagcaattgtgcgttagtagaacttgtctttaaattccagagactgtccgtactaatattaactatccccttaccggaggcatttcctccgataaatccatagcccgtactattaagggtggcaccattactgacatttacgataccgctaccaaaattaccgacattgatacccacagtatcgaagctacttgtcgcatccatcaggttcagtgtgccgataccgcttgctttatcgcccaaaaaagtaatattttggcttacgaacttaccgccatcgctaatattgaggtttccgacgcccgcaacaccaatggtggtatagacattcttattgacctcccacattccccccgtggtgatgctgacattcccgacgccggtttctccataaccgagactacttcctccgttgctgacaacaagcccctgattactgatattcatttcgccgtggccgtcataaccaagattagttccgagattagtgataacggagttcttatccttaacagtaatgttgcctgtgcctgtttctttcatccccgcagtgataattccgctatctactttgccttcactgctgacattaagttcaccgtcgccagcatcaccgatatagatatagcggaaagcttcgcccgttccgaggaaattccaatgccctttatcggtcacgttgacgacaccgtgggaaccgtcctgaacgcccaccaaactatattctttgttattaatcagtccattattggaaatattgactgtgccattaccgaaatatccattatagagtctgcgtaccgtgatgacagagtcttgatcctgcacattcagggttccgataccggtggcattgccaccgataatcgtattttcagccgtaaccaaccccccctcgcgaatagtcgcctccccagttccttgattaccaatttgaaattcaatactggaatcattattttttattagccactcgccacccttttcaacgacaacctggccattactgcccgcctgatagcctaaaatggcgacgatactactcgtgacgtaacccttatccgtaatatttaaactacctgtgccatagctacctatttcgaataattcggtcgtcagaacagagtcctctccctcaacattgaccgtcccgacgcctcctgtgctagaacctaatcttaaatagcctccatcgacgtgacccttctgtttaatattcagcgtccccgttccggattgacccacatttaaaggccttgcattatttccgctatcatacaatcgccaggtgccacccaaaacattaacggtgccctcactgtcctcattagcgccaatgacgctggtagtaatagtggttaaggaggcattaccgccagccaaaatattaagcactccagtgccataccagccaaccaggtaggcatcataagcaacatcagtatcaatattggtaatctgatcattatcaacttccagacttgcaccagacgcactaccgcttagtgccagcaaaacacccagcgtcaatctactgaatttcgttgtcagtccagaggatttacgcaaattaaccgtgcttgttttacctgccctgcgagttaattcgctgcaggcctgaaatacctgtagagtgcaattccatatcacgcgatagattctattcatataaacgctccatatacaaacaatacagccacgaaagagatgagtcgtcagacattaaaaatgaaacttattaaattgtcagaggtctgtattgagtgttagttggaggtgggaaggtgtcaatttggctaatttgctaatgctttcgaattgatagattaaaaattgcatagttcttattttatttaaatatgaactatgagttattgttgcttaataagaaaactgtttctttcaataggaaaattatcatcatcatatttaacaaagaatagcactaattgctaaaaatcgaagtttattaaaccccttttgcatccattagtgtctttaggaatattcgctataaaataagggttgtgcttaatgctttaagaaaaatagcaattttcccttgaatatcgtactggtgatggaacgatgaatctgcaagctggcttttaacaagccagctctaaaagaagggaaataagaataactatactcaaaaactaacagccacggtcatcatgatgtggctgtcaatgaaattataacccaggcgctttccataagctcgtcgtcagtccatgatcaaccagccccagctgatcctgataaactgcctgccacttatcgcgactatcctgataaagttcatgcttttccgggtctggtgtgtgcgtccgttcccagcgaaccaggcgttctccggtttctgccatactactaaaaattccggcaccgacgccagctgcaatggcacatcctaatgcagtggcttctttgaccaccggaatattgacgggtaatccgctgacatcagcgagaatttgactccataatttccctttactacctccgcctgcaaagactaagctactaggatgaatattgctgaaatcagcaatttgctgcaagttacacgcacttacaatcgccgcattttcttccagcgcacggaacaatgtcgctttgttacatttatccgggtcaatggacaagttaataaaggaaggcgcagcgtgataccaggttttaaagcgcattctgtcggagaagatcggcattacgccccagctcccaggcggcacccgactggccatctcttccagcagcgtataggtgtcgatgcctaaacgttcggcaatcagtttttcttcggcacagaaagcatcgcggaaccagcgcatggtgagtccggtaaaaaagcttatagattcagcttgtaccatgccaggaataacatgaggattaacgcgcacgttcatttctgggtctgtcaccggcgcggctaaatttacaacttgctgccagaatgtgccgccaagaaccgcggtttgtgccggacgcacaacgcctaacccaaggcaaccaagctgcacgtcgcctcctccaacgaccaccggagtgcccgccttcagaccgcagagttccgccgcttgactacttaccacgcccagcaatgtgccggtttctttgacaggagaaagaatatcggcacgtaggccagccatatccagcaatgcaggtttccagtcacgggtggttagatcaagaagtcccgtggtgccagcgttagagggatccaccgccagttcgccgctgagcatataggccagccagtcgctgatcatggtgatggtacttgcctgacggtaaatatcggaacgatggtgcgccagccaaagtaatctggggatggcacttaaagccagtgtttgtccggtcgcgcgataaacttcgttttcaaaggtattgttgtgcagttctttaagttcgctaacttcgcgtgccgctctggcatccacattggcgcaggcccagatcggggctccttcattattatataaaacaatgccttcacgcatgctacatgcgctaacggcagcgatatactccggggctatgccggcgttgtgcagcgcctggcgcatacactcacacgccagttgccagtttttgttgagatcaaattccatagaaccaggaacgtccggtactgccagatgccgccactccgcctgtcccactgctatttgattgccttccaggtcgaatatcacagcccgaatacttccggtgcctgcatccagcgccatcaggtagtacttactttcactaagggtaaagagtcgagccattagattatcctcggcttatgcgttctgtctgttcctctatacgttctccatcattcccggtaataaggtcatgcaaatttaactacgtaaaatcgccgctgctgtgtcctgatcggtaaccagtgcgttgatataaccgcctttcattgcagcggcaattgcttcggctttattttctccccctgccacgccaacccggacgggtatggtcttcagcgcgcttaaaggtaagccaatcagttcgttatgtattttgatattcgtgacaacgtcaccttttgcatcaaaaaagtagcctaaaatgtcgccaaccgccccttttcggccaatcattaactgttcgccctggctgatataaccggagcgaatgattgtcgcatcgtcctgttgactcacagcaccaatgccgacaatcgccacatccgctgcttgcgcggctaacagaacatctttgacgcaattttcattttttagcgtacgggcaatgtcagcggaggatgcccgcaacggagccggaataatattcacactgcacgccgcgttaagctgcccgattcccgtcatataagaaccgacgccaccggagagcgtgaccaggcgaatttgctgactgctaataaaaccacttaagcgttgcagcgtattcatggttgcctcgccaaaaccaatcgccagcatctgttgtggttgaagtaaactcatcaacatatgcgccgcgcctatccccagtcgcccaccgacatcagcatccgcaagcccagggatcacccggacatgttgcaggctaaactgacgacgtaattgagtttcatattccagacagccttcaaagcgagaattaatctgtacgcgaataatgccggactgatgccctttctccagcaatcggctcactttcaaacgtgtcaggccgagacgatcgctgatctcgctctgggtcagcccgtcgtgatagtaaaaccacgcgatccgcgcgacctgttcttcttcacacattccctgttcactaattgcgctatcgttgattgtcataattcattcttcactttgaacatatttaaatctttaatgcaattgttcagttcttgctcatttatatctgtgatggcaaccacagtttgactctacgagcatgaacaaacgcaaccgtgaaaatcaaaatagcataaattgtgatctattcgtcggaaatatgtgcaatgtccacctaaggttatgaacaaattaaaagcagaaatacatttgttcaaaactcacctgcaaaactgaacgggggaaatatgcaaacgagtgatacccgcgcgttaccgctactttgcgcccgcagcgtttataaacagtatagtggggtcaatgtcctgaaaggcatcgattttacgttgcatcagggggaggtccacgccctgctcggcggcaatggtgccggtaaaagcacgttaatgaagattattgccggtattacccctgctgatagcggtacgctggagattgagggcaacaactacgtcagattaacgccagttcatgctcatcagctgggtatttatctcgttccccaggaaccgctgcttttcccaagcctgagcataaaagaaaacatcctgtttgggctggcaaaaaaacagctctccatgcagaaaatgaagaacttgctggcggcgctgggctgccagtttgatctgcatagtctggcaggaagcctggatgtcgccgatcgccaaatggtggaaatcctccgcgggctgatgcgcgacagccggattctgatcctcgatgaacctaccgccagccttacccctgcggaaaccgaacgcttgtttagtcgcttgcaagagctgcttgctactggcgtgggtattgtttttatcagccataagctgccggaaattcgccagattgccgatcgaattagcgtgatgcgcgacggaaccatcgccttaagcggcaaaaccagcgaactgtctaccgacgacattattcaggccatcaccccagcggtacgggaaaaaagcctctctgccagccaaaaattatggctggagttacctggtaaccgcccacaacatgccgccggaacgccggtgctgacactggaaaatctgaccggcgaaggtttcaggaatgtcagcctgacgctcaatgccggagaaattctgggcctggctgggctggtgggggccggacgcacagaactggccgagacgctctatggtctgcgtactttgcgtggcggacgcattatgctgaatggtaaagagatcaataaattatccactggagaacgtttactgcgcggtctggtttatctgccggaagatcgccagagttccggactgaatctcgatgctagcctggcctggaacgtctgcgcccttactcataaccttcgtggattctgggcgaaaaccgcgaaagataatgccaccctggaacgttatcgtcgggcgctgaatattaaattcaaccaaccggaacaagctgcacggacattatccggtggcaaccagcaaaaaatcctcattgccaaatgcttggaagctagcccgcaagtattgattgtcgatgagccgacgcgcggcgtggatgtcagcgcccgtaatgatatctaccagctgttgcgcagcatcgccgcacaaaatgtggctgtgctgcttatctcctccgacctggaagagatcgaactgatggcagatcgtgtgtatgtgatgcatcagggcgaaattacccactctgcactgaccgagcgcgatattaatgtcgagactattatgcgcgttgccttcggcgatagtcagcgtcaggaggcgagttgctgagctaaagtcagcgtcaggaggcgtcatgctgaagtttattcagaacaaccgtgaaatcacggcactgctggcggtggtgctgctgtttgtattacccggttttctcgaccgccagtatttaagtgtgcaaacgctgaccatggtttatagcagcgcgcaaatcctgatcctgctggcaatgggcgcgacgctggtaatgcttacgcgcaatattgatgttagtgtgggtagcattaccggaatgtgcgcggtgctgttggggatgttactgaacgcaggatatagtctacctgttgcttgtgtcgcgactttactgcttggtttgctcgcgggatttttcaacggtgtcctggtcgcgtggctaaagatccctgccattgttgccacccttggcacgttagggttgtacagaggcatcatgttgctgtggactggcggcaaatggattgaagggttacccgccgaactgaaacagctctccgccccgctgctgcttggcgttagtgcaattggttggttgacgataattctggtggcatttatggcctggctgctggcaaagacggcgtttggacgcagtttttatgccacgggcgataatttacagggcgctcgtcaactgggcgttcgtactgaagccattcgcattgtggcatttagcttgaacggctgcatggcggcactggcgggaattgtgtttgctagccagattggttttatccccaaccagaccggtaccgggctggagatgaaagcaattgcagcctgcgtgctgggcggcattagtttgctcggtggttccggtgcgatcattggtgcggtactcggcgcatggttcctgacgcagatcgatagcgtactggtgctgttgcgcattccggcatggtggaatgattttatcgcgggtctggttctgctggcggtgctggtgtttgatggacgcctgcgttgtgcgctggaacgtaatctacggcggcaaaaatatgcccgctttatgacgccaccgccatccgttaaacccgctagcagtggtaaaaaacgggaggccgcataatgcgtattcgctacggttgggaactggctcttgccgcactgctcgttattgagattgtcgcatttggtgcaattaacccgcgaatgttagatctcaatatgttgctgttcagcaccagtgactttatctgcattggcattgtcgccctaccgctaacgatggtgattgtcagtggcgggatcgatattagctttggtagcaccatcggcctctgcgccattgcattgggcgtactgtttcaaagtggtgtgccgatgccgctggcgatactcctgaccttactgctcggcgcattgtgcgggctgatcaacgccggattaattatctataccaaagttaacccgctggtgattacgcttggcacgctgtatctgtttgccggaagcgctctgctgctttccggtatggccggagcgacggggtacgaaggtattggtggattcccgatggcgtttacagatttcgctaacctggatgtgctgggactccccgttccgctgattatcttcctgatatgtctcctcgttttctggctctggctgcataaaacccatgccggacgtaatgtgtttttgattgggcaaagcccgcgcgtggcgctttatagcgcgattccagttaaccgtaccttatgtgcgctctatgccatgacggggctggcgtctgcggtcgccgctgtgctgctggtaagctattttggtagtgcacgttccgatctcggtgcgagctttctgatgcccgccatcaccgccgtggtgcttggcggggccaatatttatggtggttccggttccattatcggcaccgccattgcggttttattagtgggatatttgcaacaaggtttgcaaatggcaggagtgccaaatcaggtgtccagcgccctttccggtgcgctacttatcgtcgttgtcgtaggtcgttccgttagcctgcatcgccagcaaattaaagagtggctggcgcgtcgggccaataacccattgccataaaggatatcttcatgacacttcatcgctttaagaaaatcgccttacttagcgctcttggcattgccgcaatctctatgaatgtgcaggccgcagagcgtattgcatttattcccaaactggttggcgtgggattttttaccagcggtggcaacggcgcacaacaagcgggtaaagagctgggcgttgatgtgacctacgacgggccgacagaacccagtgtttctggtcaggtacagttgattaataacttcgtcaatcaaggttataacgccattatcgtttctgcggttagccctgatggcttgtgtccggcactgaaacgcgccatgcaacgtggtgtgagagtgctgacctgggactctgatactaaaccggagtgccgctcttactacattaatcagggaacgcccgcccagttaggaggtatgttggtggatatggcggcgcgtcaggtgaataaagacaaagccaaagtcgcgtttttctacagtagccccaccgttacggaccaaaaccagtgggtgaaagaagcgaaagcgaaaatcgccaaagagcatccaggctgggaaattgtcactacgcagtttggctataacgatgccactaaaagcttacaaaccgcagaaggaatattaaaagcgtatagcgatctcgacgccattatcgcccccgatgccaacgccctgcccgctgccgcacaagccgcagaaaacttgaaaaatgacaaagtagcgattgtcggattcagtacgccaaatgtgatgcgcccgtatgtagagcgcggcacggtgaaagaatttggcctgtgggatgtggttcagcaaggcaaaattagtgtgtatgtcgcggatgcattattgaaaaaaggaagtatgaaaacgggcgacaagctggatatcaagggcgtaggtcaggttgaagtcagcccaaacagcgttcagggctatgactacgaagcggatggtaatggcatcgtactgttaccggagcgcgtgatattcaacaaagagaatatcggcaaatacgatttctgatgtgcattacttaaccggagtaagttatggcagatttagacgatattaaagatggtaaagattttcgtaccgatcaaccgcaaaaaaatatcccttttaccctgaaaggttgcggtgcgctggattggggaatgcagagtcgcttaagccggatatttaatccgaaaacgggtaaaaccgtgatgctggcttttgaccatggttattttcagggaccgactaccggacttgaacgcattgatataaatatcgccccgctgtttgaacatgccgatgtattaatgtgtacgcgcggcattttgcgcagcgtagttccccctgcgaccaataggccggtggtactgcgggcgagtggtgcgaactctattctggcggaattaagtaatgaagccgtggcgttaagcatggatgacgccgtgcgcctgaacagttgcgcggtggcggcgcaggtttatatcggcagcgaatatgaacatcagagcatcaaaaatattattcagctggttgatgccggaatgaaagtgggaatgccgaccatggccgtgactggcgtgggcaaagatatggtgcgcgatcagcgttatttcagcctcgcgactcgaatcgccgctgaaatgggggcgcaaattatcaaaacctattatgtcgaaaaaggttttgaacggattgttgccggatgtccggtacccattgttattgctggcggtaaaaaattaccggagcgcgaggcgctggaaatgtgctggcaggctatcgatcagggcgcttctggtgtggatatggggcgtaatattttccagtctgaccatccggtggcgatgatgaaagccgtacaggcggtggttcaccataacgaaacggctgatcgggcatatgaactctatctgagtgaaaaacagtaactgcggatctaaggagaagaattatgcacgtcacactggttgaaattaacgttcatgaagacaaggttgacgagtttatcgaagtttttcgccagaaccacctgggctctgtacaggaagaaggcaatttgcgcttcgatgtcttacaggacccggaagtgaatagccgcttttatatctacgaagcctataaagatgaagacgcagtggcgttccataaaaccacgccccactacaaaacctgtgtcgcgaaactggaatctttaatgaccgggccgcgtaaaaaacgtctgttcaatggtttgatgccgtgaggcgaatttatcaattttatctacaattggggtaacgcgctgacgggagtaaaaaaatgtctgactggaacccctctttatatctacacttttccgctgaacgaagccgtccggcggtggagctgcttgccagagtgccgctggaaaatgtcgaatatgttgccgatcttggctgtggcccaggtaacagcaccgcccttctacaacaacgttggcctgcggccaggataacaggcatcgacagctctccggcgatgattgctgaagcgcgcagtgctttgccagactgccagttcgtggaagcagacatccgcaactggcaaccggtacaggcactcgatctgatttttgctaatgccagtctgcaatggctgcccgaccactacgaattgtttcctcatctggtttctttacttaatccgcagggcgtgctggcagtacagatgccagataactggctggagccgacccatgtgctcatgcgcgaagttgcctgggaacaaaactacccggatcgcgggcgtgagccgttggctggcgttcatgcttactacgatattttgagcgaagccggatgtgaggtcgatatctggcgaaccacctactatcaccagatgccgagtcaccaggcgattatcgattgggtgactgccactggattacgtccgtggttacaggatctgaccgagagcgaacagcagctttttcttaagcgctaccatcagatgctggaagagcagtatccactgcaagagaacggacagatactgctggcatttccgcgtctgtttattgttgcccggcgtatggagtaaatatcacgtcagctggtaatgacgatcgggaagaatttttgctggaatttcggcttcatcgttcatctgtaacaggtcaatttcaatagcgttgcagatggcatccagtggtaaatcattgttttcagtaccgaacggatcttccagttcttccgccagacaatccaggctaataaaagtgtaggaaatcagcacagagataaaaggcgtcatgtaatgcaggtccacgaccagcgcgaacggcagcatgatacaaaacagataaacggtacgatgcaaaatcagggtgtaggcaaagggaattggcgtataggcaatgcgctcgcatcctgccaggaccgcactaatatcattaagccgatcgttgaggctaataaacaggatatcactaagctgtccattgcggcgctgaaccgccaaccattctcccattattaacaagatacggttagctggagagttgctagccagtacacgctgaagatcttcagtcttgagataatgagccagcacttccgcctgtggctgtttgcgtaatgtcatgcgtaaacagtgggcgaaagcgatttgcagccgggcaaactcccttacacttgcgctatccggcaatgtcgtttttacctcgcgcagtaagctccgactggcaatcatcaactgcccccaaagttttcgcgcttcaacgtaacgggcgtacccggcattattacgaaaaccaagaaaaatggcgatggcgacaccgagaatgctgaacggtgcgagggtgaatttgatgcccagatgcgtgtaccagggcagcatgaaaataacagcgatagaaaagagaaaattgagtagtaagcggctggatatcttggataatacactgccgtgccagacaaaaatacggcgcagccagtgttgttgtggacgaacaatcatggttatcttcaggcgtggaaaagtcgccctattaaacgtgattacgatcacattctcaagacgctacttacaaattacctacaagcttacaacattagcaggcgctgcatgtggcacctgttaatgataaaggcatataggatgttgtaactaatatggtgaaataagaaacccggtcgaaaccgggttcagaagtaacggtgttattagcacaacggacgtacagcttcgcgcatccctttttcgagaatcgcatccaggtcattagcaacctgctcgaccagaccaggcacttgcgtcaggtcctgctcccagtggtctttttctgccaaaacaatcgctaccagttcctgggtgccgataacacggtcacgatgctggctccagagttgctgataacgttccagccagtgtgcatcgtcctgtaccggatatgtttcgccgttacgctcaccacgatagaacgcaatcaatgccgctaatgcgaaagtaaggcgcgccggaagtgtgccgtttgccttctgccctgccagcagctgtggcaggatgcgggtgcggaacttggtcataccgttgagcgcgatagacagcagctgatgcttaatgtacgggttacggaaacgcccggtgactgcactggcgaaagattccagttcatcacgaggcaaatccagtaccggaataatttcttcgtagatagctttttcaacgaatgcgcaaatttcagcatcgttcatcgcttcacctacggtatccagccctgcctggaacgccaccggcaccagcgcggtgtgcgcaccgttgaggattgccactttgcgttctttgtacggtttaatatcgtcaacaatcagcacgttgagcggatatttgtccagacgcagttcagtcgctaaggatttcggtccctgaatcacaaacaggtaaaagtgttcagcggtgtcgagaaaaccatcgtgataacccagttcttcttccagtttagccacttcatcgcgcggataaccggtaacgatacggtccaccagcgtagaacagaagctgttagcctgatccagccattgaataaatgcttctggcagtgcccactcttgcgcatagcgcagcaccagttcacgcaacgcgtcgccattgtagtcaatcaactcacacggaatgatgatccaacctttatccagcgcaccgttgaaatggctaaagcgttcgaacagcagacgggtcagttttgccggatagcttaccgctggcgcgtcatcgaatttatcgcccgcatggtagctgatacccgcttcggtggtgttagagaaaacaaagcgcatttccgggttgtgcgccagtttcaggaattcatcgtattcactgtagacgctgatttcacgattaacgctgcgaatcagacgcgcgtcgctgaccgcttcccccttctcattcaggccacggataatggtggtgtacagaccatcctgcgtgctcagactcggcgggaaactagtttcaatcggacgaacaacgaccacgccagaattcagatcggtgtgctcattcaggagatcgatttgccagtcaacaaaggcgcgcaggaagttaccttcaccaaactgaatgatacgttctggatactgtgcaccgggaaaatcgcgacgatttagtgttttcacaatgggttcccttctgattagtcatacaacctgtttgaattggtacgacaggttagcaaactttaatacgccgaacccctgttttgatcaactcctgatgattaatgagcagttttatgagaaaagtgtggcgcggatcatggtttaatcgaggaaaaacgccttttcctggatcataaagtggtagaacacattgcattcaaatcgcgcgtaatgaataaagatgtcagacaacttcctcaccgtaacgcatagtgctggtacggttgcgcccatctttcttgctgcgatacagacacgtatcggcttcgaccatcaatttattaaagtcatcggtcagcgttaggtagcttgcgcgaccactaccgacgccaatacttaccgtgagataaagcgttttttgttgccaggtgaatggttgcagttcaacgcctttacggattttttccgccattagcagaccatcgacaggattcacgctcggcactgcaacagcaaattcttcgccgcccattcgcgccaccagccccttatcaccgacaatcttctgaatatgccgggcaaacacgcttaacactttatcgccacattcatgtccatagttatcgttaatgcttttgaaatagtcgatatcaagcagcatgacagtcagatgttgtgtctgtttcaggcttggacttttcagcgcctcataaagaccggaccgactgtaaacctgagtcagaaaatcaaagtcggctcgcagcgcaacttgcttcattaggctattgatcgctgccacgctaaaagaaaccataattgggcatatcgccatcgtggcaataccgagacgtgcggagaacatttgcggaatggagaacgggctaccgacgctgatatcaatcacgctatttgccaccagtacgatttccaccgcaccggtgacaaaggtcaacagacatgttacctgcggcgtatagcgcactgcacaccagattaatgcaggcagcgggaacgccagactccccgctccgccaatgactacgctggcaataacgctcacaataagcgcgatggcgggcatcatctgttctgctttaaagcgcggcagcactccaggaatagccaacgtcagcatacaaggcacgatcaacacgcccgtactgaattgctcactgaaccagtccgcaagcaaaggccagaaatccagactatcaatactgaccgaaccaagatagcatgttcgctgacagcggcggcaaataaaggtaccctgggaatgctattttgtcgttttccgcaattctcatggctgattcatctgtacaaccagccagtgatagattaccgccacgatataacgttgttgttcttcgcttaagctaacaccctgcggaatgttatgccacttagccagacaaccgcgacagcaggtcgcggtggcgtgctgagcgataaacaccggatgcccgcgcatgggggtttgcttaccgtcattagccggtaatgccggagcaagacgtttagcgacaaaatccgccgcatgttgttcgatgactggcgcgcctttctccaggcaatactgacgctctttcatgcccagacgaaagcgagagcgaaatttactacgggataaacgcgcgaagagtggatcgagagactgcattaataaacgctacgccctaactgtttcgtcaattgttcaagaacggcaatacccgcaaggctgttacctgcatcatccagttccggactccagacagcgatggccatttcatgcggaacaatcgccacaataccgccaccaacgccagatttcgccggtagccccacccgccaggcaaactcccccgcgttctggtacataccactggtcgccatcagcgcgttaatttgccgcgcctgcattggcgtcaccactggttcatcaatatgaatagctttcccctgattagccagaaagacaaacgtccgggccagctctacacagctcattttcagagcgcagtaatgaaagtagttttgcagaacggttgtcacgtcatgatggaaattgccaaagctcttcatcagccaggcgatagccgcatttcgcgcggaatgttcaaattcggaacgcgctaccaccgtatcgtaggaaatatcagacacaccgcttaagccgcgcacgacttccagcatacgttgccgtggtgcgcttaatcgcccttgcaacatatcgcagaccaccagcgcaccggcattaatgaacggattacgcggtataccctgctccatttccagttgcactaaggaattgaacggacttccagacggatctttgccgacgcgttgccagatttcctcttcggagtaatgacgcatggcgacaacgagactcagcactttggaaatagactgaatggaaaaacgttcttgcgcgtctccggcctgaaaaagctgtccgtcaacggtacagatagcaatccccaatcgggaaccgtctactgtagccagcgccggaatataatccgcgactttaccctgaccaatgagcggccgcacttgccgcaagatgttttctaaaattgcattatccatggcgactgccactttctactcctggaccgcaggtctgaaaagacctgcgagtatatcagagctgaatatgtcgcgtcagatccggtctttccacaccgtctggatattacagaattcgtgtaagccgaaatgggaaagctcacgaccaaagccactctttttcacgccaccaaaggccactcgcgcgtcgctggcacaataaccattgataaacaccccaccgcattccagacgtgccgccatctgtctggcctgtgtttcgtcagtggtaaaaatggtcgcactaaggccgaactcactatcattagccagttccagtgcatgttctgcatctttcgcaatggtgattgccgcaacggggccaaacatttcttcccgaaacgcggtcatttctggggtaacattcgccagaaccgttggcggatagtagttacctgccccagccatcttttccccgcccagtaacaaacgcgcaccctgcgccagggttttctccacctgatgatgcagctcatcacgtaaatcaaaacgagccattggtccgagagcgttctcttcgtcacggggatcgcccattttcaaggctgccgcagctgccacaaaacgttcggtaaatgcgctagcaattccctcttcgataataaagcgttttgccgctgcacatacctgtccggtattctgataacgtccggctaccgccgctttcaccgccagttccagatcggcatcgttaagcacaataaacggatcgctaccgcccagttccagtacgcattttttcagtgccgctccagcctgtgcgccaatagccgctcccgcacgaacacttccggtcaccgtgacagcagcaatgcggctgtctttaatcatctgactgacaccgtcgttgtcggcattcagccagccatatacgccttgtgggatacccgcatctttaaacacctgggcaatgagctgtgcacagcccatcacattcggcgcatgtttaagtaagtagccgttacctgcaagaatgatgggaacagcgccacgcatcacctgccataacggaaaattccacggcataatcgccagaatcgtccccaacggtcgatactcaataaccgcctgctgattttccaccagcgtaggttccgccttcagcattgccggaccatgttctgcataccagtcacacaaattcgcgcttttcgccacttcagcgcgcgcctggttgattggtttgcccatttcgcgggtgatcatttgcgccatttcttcgctacgagcgcgcagagccttaccgatatcacgcagtttttcagcacgataatctatatttgtctcgcgccagtcgcgaaagcctgctgccgccagctgaagtgcgttttcgatatcgtcagcgccagcccacggcagcacagaaagttgttcacccgtggcaggatttatgctaattgcatgagttgccggagtaatggtcatcggggtatctcctttatgagtcatggtatgaagatacgcagatttactcttgctttaaaatgaataatattaagccacttattcacgaatcgagaatgctatggatctgacccaactggagatgttcaacgcggttgccgaagctggcagcataacccaggctgcagcaaaagtgcatcgcgtgccgagcaatctcactacccgtctgcgccagctggaaacagaactgggggttgatctgtttattcgcgagaatcagcgtttacgtctctctcctgccgggcataactttttacgctatagccaacaaattctcgcgttagtggatgaagcgcggagcgttgtcgctggcgatgagccgcaaggtttattttctcttggtagcctggaaagcaccgctgcagtgcgcattccagccacgctggcggaattcaaccgtcgttatcccaaaattcagtttagtctttccaccggcccttccggcactatgctggatggtgtactggagggaaaactgaatgcggcgtttattgatggacccattaaccatactgccatcgacgggataccggtataccgcgaggaactgatgatcgtcacgccacaaggatatgcgccagtaacccgtgccagtcaggttaatggcagtaacatttatgccttccgcgccaattgtagctatcgtcgccacttcgagagctggtttcatgctgacggtgccgctccgggaactatccatgagatggagtcttatcacggaatgttggcctgtgtgatcgcaggagcaggcattgcgcttattccgcgctctatgctggaaagtatgccggggcatcaccaggttgaagcgtggccgttagctgagcaatggcgttggttaacaacctggctggtctggcgtcgtggtgcgaaaacacgtccgctcgaggcatttattcaactgctggatgtgcctgacagcgcaagacagggatatcaatgagctatttttgatagttcttgcggttaatatgctctatatagtgatgttccgatgacttatgactatatggggcaaatatggttacgccagtaagcatcagcaattacatatctcttcctgatgattttcccgtacgtaatattgcaccgcaggtaaaagaagttttaaaggattttattgatgcacttagtacaataatatgtaatgaagagtggcgcacgtctttaaacatcaacagtgccacaaaaaagatatttaataaccttgacaacttaagttatattcagaggacttcttttcggggtaacgacacgctatacaatgaaaaggttcagtttaaactcacttatcccgccaggaatggaagacacaaagaaaatattgaatttcaggtagtaataaatttaagccctatttatttagataattttcgccatgatggagaaattaatattttttgcgctcccaacccaaagcctgtcactatggggcgcgtatttcagaccggcgtcgagcgtgtactctttctgtttctgaatgattttattgaacaatttccaatgatcaaccctggtgttcccatcaaaagagcgcatacaccacatattgaacccctgcctagcgatcaccataccgctgcagattacttacgccagtttgatttgcttgtcctgaattttatctctcgcggtaattttgtcatactcccccgattatggaataactctgaggttcacagatggttcgtcaataaagatcctaacttgatcaccgccattctcgacataacggacagcgaattaaaagaggatttgttgcaaagcctgatggatagtttaggttctaacaaacatgtactacccgaagtctgcatctgctttttatcccttttagcagaacaagaatctcctcattttcagaacttgtttttatttttcgccaatatgttattgcactatcaccaatttatgaatcccaatgaaagtgatttgaatgacgtgttgatgccagcaagtttaagtgatgataaaattatcaaacatatggcgcgcaggaccctcaaactgtttgtaaaaaatgaaacaccgccaaaagttactcacgaagacctggtgaaaaacaggcctcgctcccctgtcagaccacctatacccgcaaccgccaaaacgccagacctccctgaacgtcattaaaccgtgatgttaccgactctctgacgcgtgaaagaatcagcgtcagagaaacggaaaacgcgatccagatcacaaatgcattgtattcacatcattaaccgttttaagatcatttcatcactttttcgcaactcacccgataatctgttatgacaacaaacactgtttcccgcaaagtggcgtggctacgggtcgttacgctggcagtcgccgccttcatcttcaacaccaccgaatttgtccctgttggcctgctctctgacattgcgcaaagttttcacatgcaaaccgctcaggtcggcatcatgttgaccatttacgcatgggtagtagcgctaatgagtttgccttttatgttaatgaccagtcaggttgaacggcgcaaattactgatctgcctgtttgtggtgtttattgccagccacgtactgagctttttgagctggagctttaccgttctggtgatcagtcgcattggtgtggcttttgcacatgcgattttctggagcattacggcgtctctggcgatccgtatggctccggccgggaagcgagcacaggcattgagtttaattgccaccggtacagcactggcgatggtcttaggtttacctctcgggcgcattgtgggccagtatttcggttggcgaatgaccttcttcgcgattggtattggggcgcttatcacccttttgtgcctgattaagttacttcccttactgcccagtgagcattccggtagtctgaaaagcctcccgctattgttccgccgcccggcattgatgagcatttatttgttaactgtggtggttgtcaccgcccattacacggcatacagctatatcgagccttttgtacaaaacattgcgggattcagcgccaactttgccacggcattactgttattactcggtggtgcgggcattattggcagcgtgattttcggtaaactgggtaatcagtatgcgtctgcgttggtgagtacggcgattgcgctgttgctggtgtgcctggcattgctgttacctgcggcgaacagtgaaatacacctcggggtgctgagtattttctgggggatcgcgatgatgatcatcgggcttggtatgcaggttaaagtgctggcgctggcaccagatgctaccgacgtcgcgatggcgctattctccggcatatttaatattggaatcggggcgggtgcgttggtaggtaatcaggtgagtttgcactggagtatgagcatgattggttatgtgggcgcggtgcctgcttttgccgcgttaatttggagtatcattatatttcgccgctggccagtgacactcgaagaacagacgcaataattgaaaggcccattcgggccttttttaatggtacgttttaatgatttccaggatgccgttaataataaactgcacacccatacataccagcaggaatcccatcagacgggagatcgcttcaatgccacccttgcccaccagccgcataattgcgccggagctgcgtaggcttccccacaaaataaccgccaccaggaaaaagatcagcggcggcgcaaccatcagtacccaatcagcgaaggtactactctgacgcactgtggacgcgctgctaataatcatcgctatggttcccggaccggcagtacttggcattgccagcggcacaaaggcaatattggcactgggttcatcttccagctcttcgctcttgcttttcgcctccggactatcaatcgctttctgttgcggaaagagcatccgaaaaccgataaacgcgacgattaagccgcctgcaattcgcagaccgggaatgctaatgccaaatgtatccatcaccagttgcccggcgtaatacgccaccatcatgatggcaaatacgtacacgctggccatcaagctctgacgattacgttcggcactgttcatgttgcctgccaggccaagaaataacgcgacagttgttaatgggttagctaacggcagcaacaccaccagccccaggccaattgctttaaacaaatctaacattggtggttgttatcctgtgtatctgggttatcagcgaaaagtataaggggtaaacaaggataaagtgtcactctttagctagccttgcatcgcattgaacaaaacttgaaccgatttagcaaaacgtggcatcggtcaattcattcatttgacttatacttgcctgggcaatattatcccctgcaactaattacttgccagggcaactaatgtgaaaagtaccagcgatctgttcaatgaaattattccattgggtcgcttaatccatatggttaatcagaagaaagatcgcctgcttaacgagtatctgtctccgctggatattaccgcggcacagtttaaggtgctctgctctatccgctgcgcggcgtgtattactccggttgaactgaaaaaggtattgagcgtcgacctgggagcactgacccgtatgctggatcgcctggtctgtaaaggctgggtggaaaggttgccgaacccgaatgacaagcgcggcgtactggtaaaacttaccaccggcggcgcggcaatatgtgaacaatgccatcaattagttggccaggacctgcaccaagaattaacaaaaaacctgacggcggacgaagtggcaacacttgagtatttgcttaagaaagtcctgccgtaaacaaaaaagaggtatgacgatgtccagacgcaatactgacgctattaccattcatagcattttggactggatcgaggacaacctggaaagcccactgagtctggagaaagtgagtgagcgtagcggttactccaaatggcacctgcaacggatgtttaaaaaagaaaccggtcatagtttaggccaatacatccgcagccgtaagatgacggaaatcgcgcaaaagctgaaggaaagtaacgagccgatactctatctggcagaacgatatggcttcgagagccaacaaactctgacccgaaccttcaaaaattactttgatgttccgccgcataaataccggatgaccaatatgcagggcgaaagccgctttttacatccattaaatcattacaacagctaattgaaaacgtgacaacgtcactgaggcaatcatgaaaccacttagttccgcaatagcagctgcgcttattctcttttccgcgcagggcgttgcggaacaaaccacgcagccagttgttacttcttgtgccaatgtcgtggttgttcccccaagccaggaacacccaccgtttgatttaaatcacatgggtactggcagtgataagagcgatgcgctcggcgtgccctattataatcaacacgctatgtaatttgttctggccccgacatctcggggcttattaacttcccacctttaccgctttacgccaccgcaagccaaatacattgatatacagcccggtcataatgagcaccgcacctaaaaattgcagacccgttaagcgttcatccaacaatagtgccgcacttgccagtcctactacgggcaccagtaagcttaacggtgcaacccgccaggtttcatagcgtcccagtaacgtcccccagatcccataaccaacaattgtcgccacaaacgccagatacatcagagacaagatggtggtcatatcgatagtaaccagactgtgaatcatggttgcggaaccatcgagaatcaggctggcaacaaagaagggaatgattgggattaaagcgctccagattaccaggctcatcaccgccggacgcgtactgtggctcatgatctttttattgaagatgttgccacacgcccaactaaatgctgccgccagggtcaacataaagccgagcatcgccacatgctgaccgttcagactatcttcgattaacaccagtacgccaaaaatcgctaaggcgatccccgccaattgtttgccatgcagtcgctccccgaaagtaaacgcgccaagcatgatagtaaaaaacgcctgtgcctgtaacaccaggctagccagtccagcaggcataccgaagttaatggcacaaaaaagaaaagcaaactgcgcaaaactgatggttaatccataccccagcagcaaattcagtggtactttcggtcgtgcgacaaaaaagatagccggaaaagcgaccagcataaagcgcaaaccggccagcatcagcggtggcatgttatgaagccccactttgatgaccacaaaatttagcccccatacgaccactaccagtagcgccaacaccccatcttttcggctcattctaccgcctctgaatttcatcttttgtaagcaatcaacttagctgaatttacttttctttaacagttgattcgttagtcgccggttacgacggcattaatgcgcaaataagtcgctatacttcggatttttgccatgctatttctttacatctctaaaacaaaacataacgaaacgcactgccggacagacaaatgaacttatccctacgacgctctaccagcgcccttcttgccagcagcttgttattaaccatcggacgcggcgctacgctgccatttatgaccatttacttgagtcgccagtacagcctgagtgtcgatctaatcggttatgcgatgacaattgcgctcactattggcgtcgtttttagcctcggttttggtatcctggcggataagttcgacaagaaacgctatatgttactggcaattaccgccttcgccagcggttttattgccattactttagtgaataacgtgacgctggttgtgctcttttttgccctcattaactgcgcctattctgtttttgctaccgtgctgaaagcctggtttgccgacaatcttagctccaccagcaaaacgaaaatcttcagtatcaactacaccatgctaaacattggctggaccatcggtccgccgctcggcacgctgttggtaatgcagagcatcaatctgcccttctggctggcagctatctgttccgcgtttcccatgcttttcattcaaatttgggtaaagcgcagcgagaaaatcatcgccacggaaacaggcagtgtctggagcccgaaagttttattacaagataaagcactgttgtggtttacctgctctggttttctggcttcttttgtaagcggcgcatttgctagttgcattagtcaatatgtgatggtgattgctgatggggattttgccgaaaaggtggtcgcggttgttcttccggtgaatgctgccatggtggttacgttgcaatattccgtgggccgccgacttaacccggctaacatccgcgcgctgatgacagcaggcaccctctgtttcgtcatcggtctggtcggttttattttttccggcaacagcctgctattgtggggtatgagtgctgcggtatttactgtcggtgaaatcatttatgcgccgggcgagtatatgttgattgaccatattgcgccgccagaaatgaaagccagctatttttccgcccagtctttaggctggcttggtgccgcgattaacccattagtgagtggcgtagtgctaaccagcctgccgccttccagcctgtttgtcatcttagcgttggtgatcattgctgcgtgggtgctgatgttaaaagggattcgagcaagaccgtgggggcagcccgcgctttgttgatttaagtcgaacacaataaagatttaattcagccttcgtttaggttacctctgctaatatctttctcattgagatgaaaattaaggtaagcgaggaaacacaccacaccataaacggaggcaaataatgctgggtaatatgaatgtttttatggccgtactgggaataattttattttctggttttctggccgcgtatttcagccacaaatgggatgactaatgaacggagataatccctcacctaaccggccccttgttacagttgtgtacaaggggcctgatttttatgacggcgaaaaaaaaccgccagtaaaccggcggtgaatgcttgcatggatagatttgtgttttgcttttacgctaacaggcattttcctgcactgataacgaatcgttgacacagtagcatcagttttctcaatgaatgttaaacggagcttaaactcggttaatcacattttgttcgtcaataaacatgcagcgatttcttccggtttgcttaccctcatacattgcccggtccgctcttccaatgaccacatccagaggctcttcaggaaatgcgcgactcacacctgctgtcacggtaatgttgatatgcccttcagaatgtgtgatggcatggttatcgactaactggcaaattctgacacctgcacgacatgcttcttcatcattagccgctttgacaataatgataaattcttcgcccccgtagcgataaaccgtttcgtaatcacgcgtccaactggctaagtaagttgccagggtgcgtaatactacatcgccgattaaatgcccgtaggtatcattaaccaatttaaatcggtcaatatccaacaacattaaataaagattcagaggctcagcgttgcgtaactgatgatcaaaggattcatcaagaacccgacgacccggcaatcccgtcaaaacatccatattgctacggatcgtcagcaaataaattttgtaatcggttaatgccgcagtaaaagaaagcaacccctcctgaaaggcgtcgaaatgcgcgtcctgccagtgattttcaacaatagccagcattaattcccgaccacagttatgcatatgttgatgggcagaatccattagccgaacgtaaggtaattcatcgttatcgagtggccccagatgatcaatccaccgaccaaactggcacagtccataagaatggttatccgttatttctggcttactggcatctctcgcgaccacgctgtgaaacatactcaccagccactggtagtgggcatcgatagccttattgagatttaacaagatggcatcaatttccgttgtcttcttgatcattgccactcctttttcacagttccttgtgcgcgctattctaacgagagaaaagcaaaattacgtcaatattttcatagaaatccgaagttatgagtcatctctgagataacattgtgatttaaaacaaaatcagcggataaaaaagtgtttaattctgtaaattacctctgcattatcgtaaataaaaggatgacaaatagcataacccaataccctaatggcccagtagttcaggccatcaggctaatttatttttatttctgcaaatgagtgacccgaacgacggccggcgcgcttttcttatccagactgccactaatgttgatcatctggtccggctgaacttctcgtccatcaaagacggccgcaggaataacgacattaatttcaccgctcttatcgcgaaaaacgtaacggtcctctcctttgtgagaaatcaaattaccgcgtagactaacgctagcgccatcgtgcatggtttttgcgaaatcaacggtcattttttttgcatcatcggttccgcgatagccatcttctattgcatgaggcggcggtggcgctgcatcctgttttaaaccgccctggtcatctgccaacgcataaggcatgacaagaaaacttgctaatacaatggcctgaaatttcatactaactccttaattgcgtttggtttgacttattaagtctggttgctatttttataattgccaaataagaatattgccaattgttataaggcatttaaaatcagccaactagctgtcaaatatacagagaatttaactcactaaagttaagaagattgaaaagtcttaaacatattttcagaataatcggatttatatgtttgaaaattattatattggacgagcatacagaaaaagcaaatcacctttacatataaaagcgtggacaaaaaacagtgaacattaatagagataaaattgtacaacttgtagataccgatactattgaaaacctgacatccgcgttgagtcaaagacttatcgcggatcaattacgcttaactaccgccgaaagttgcaccggcggtaagttggctagcgccctgtgtgcagctgaagatacacccaaattttacggtgcaggctttgttactttcaccgatcaggcaaagatgaaaatcctcagcgtaagccagcaatctcttgaacgatattctgcggtgagtgagaaagtggcagcagaaatggcaaccggtgccatagagcgtgcggatgctgatgtcagtattgccattaccggctacggcggaccggagggcggtgaagatggtacgccagcgggtaccgtctggtttgcgtggcatattaaaggccagaactacactgcggttatgcattttgctggcgactgcgaaacggtattagctttagcggtgaggtttgccctcgcccagctgctgcaattactgctataaccaggctggcctggcgatatctcaggccagccattggtggtgtttatatgttcaagccacgatgttgcagcatcggcataatcttaggtgccttaccgcgccattgtcgatacaggcgttccagatcttcgctgttacctctggaaaggatcgcctcgcgaaaacgcagcccattttcacgcgttaatccgccctgctcaacaaaccactgataaccatcatcggccaacatttgcgtccacagataagcgtaataacctgcagcatatccgccaccaaaaatatgggcgaaataactgctgcgatagcgtggcggtatagcaggaagatccatattttccgccaccagcgcccgcaattcaaaatcatcgacatcctgcattgcttcgttttcttccaggcaatgccagcgcatatcgagaagtgcggcgctaagcagttcgctcatctcataccctttgttgaacaggctggcattacgcattttctgttgcagttcgtcaggcattgctgccccgctctgataatgccgggcgtagcgagcgaatacctgcggatgcgttgcccagtgttcgttgatttggctcggaaattcgacaaaatcacgcggcgtgttggtgccggaaagcgtggcataacgctggcgggcaaaaaggccgtgcagcgtatgaccaaattcatggaataaggttatgacatcatcccagagtaacaacgcaggctcaccggcagcgggtttctgataattgcagacgttataaattaccggatgtgttttattaagcgtactttgctcaacaaaattgcccatccatgcaccgccgcttttactatcacgggcgaagaaatcaccgtaaaataacgccagccccacgccattatgatcaaaaatttcccacacacgaacgtcaggatggtagacaggaatatcaaaacgttcgacaaacttaataccgaagagctgattcgcggtccagaatacaccttcatttaacaccgtgtttaattcaaaatatggcttgagctgcgcctcatcaagatcaaatttctcccgccgtacctgttccgcataaaatgcccagtcccacggctgcgcgctaaacccgccctgctgcttatcgataaccgcctgtatggaggctaattcatcgctcgcacgttgacgcgccgctggaacaatttcccgcataaagttaagtgctgcttcaggtgtttttgccatctgatcggcgattttccatgcggcataatgaggaaaaccaagtagtgttgcctgttgtgcacggatctccaccagacgttgaatgatagcgcgggtatcattggcatcatttttttccgctcgcgtccagcccgcaataaacagtttttcacgcgtcgcacgatcgcgcatttcggcaagcgccggttgttgggtggtattcagcagcggaatcagccatttgttatccagacctttctcgcgagccgcctctgccgccagcgcaatctcttgctcactcattcctgccagctgcgcgatatcgttcacaaccagaccgccggatttatttgctgccagtaatcgctggttaaactggctggtcagggtcgcagcttctgtattcagtacttttaattttgctttatcagcttgcgcaagtttggctccggcaaggacaaaacgttgatgaatcacctccaccaggcggatggattcactatcaagccccagggattcacggcgctgccagacagcatctacccgcgcgaataattcaccgttcagatagatatcattagccagttccgccagttcagcggaaaactgctcgtcaagacgctgtaattcatcattggtatgcgccgcagtcatcgcaaaaaagacgctggtaacgcgggtaagtaattctccgctttgttccagtgccagaatagtattgttgaaatcaggcatttgcgggttaagcgcgatggcagcaatttctgcccgcttttgctgcattccctcatcgaatgccgggcgatagtgatgattggcaatttgatcaaaatggggagccagatacggcagtgtgctttgcacaaggaaaggattcattgttgtcattttcttctcctgaacgcgaggtgttccatagcgtaggcttactgataacggagtgcaatcttgcaatccagtattacccgctcttaagcatcccgtgctatgttattgacacacaaaagcgttgaggaacagtgagaagcgcagtgcccagccatcccgatactgctgctttcaccaaatccttagtgcttctttcgtgtttttctattgtcataatggttatctctaaaaaagaggtaagatgcgtactacttactcgccgttattggtattattcagaaaaagtgagtaagactttgcagcaatgtttttgatcctgttcaaataaactaatggcatcagcaacatgctggaaatcaaacgtatgggtaattaatttttctggtttaattaaccctttacttaaccagtcgataacgatcgggaatttatttgcatttaagcgactagagaaaatagagagttcttttccggtaattccttgctgaatcacttcagacggttcactggagaaccccatcaatacaatacgtgccgctggagaagccagcgttacggcctctttcaggatagaaggatgacaagccgcatcgataattaatgtcggcttgatgcctttttcagtgaaaatctcgccaagcggtgtctggctgttattaatcgcccagtcagccccgctctctttcgctttttccagtcgttcatcaatgcgatcggcaacaatcacatttttaacgttatagacgccttttaatacctgaacgatcgtcaggccgattggaccggcaccataaaccagaacggtatcattttcagtcggttgaccatgtccggttacgttagccgcaatggtaaaaggttcgatcattaccgcatattgatcggccactgcttcaggaattttccacgcattttttgccggaaccacggcatattcactgaaaccaccgtcagcgtgcacacctaatacagccagtgtcgtacaaacgttcggtttacctatagagcacggatagcaatgcccacagctgaccaccggatcgacagcaacacgttcaccgactctggcgctttccacgccttcacccactgcatcaatgacgccaaagaattcatgaccaatgacgcgcggatatttcgcaaaaggattatgcccacgataaatatggctatcactaccacaaattccggcaagtttcacttttactcgtacttcacccgcactcggggtgggtatttcacgttcgacaatcgccagttgattcggtttttcaattaatatgcttttcattatcttactccttaccagttccacagcgtgccatcttccagacgtgcgactggtagataagcaggttcatagggatatttcgccgccagcttttcatcgaattcgataccaagacccggtttgtctcccggatgcatatagccgttatcgaaagtccagttgtgcgggaagacttcgagcatttgttcggaataacccatgtattcctggacaccgaaattggggacccacagatcaaagtgcagcgccgcagccatgcagactggactcaaatcggaaggaccgtgactgccagtacgtacctgatacaggctagcaaaatcggcaatccggcgcataccggtaattccgcctgcatgggtcagcgtggtgcggatataatcgatgagttgctcttcaatcagttgtttgcagtcccagatgctgttgaagacttcacccactgcgatgggtgtgacggtatgttggcgaatgagacggaagcattcctggttttccgcaggcgtcgggtcttccatccagaacatgcgataatcttcaatgcttttaccaaagcgcgccgcttcaataggcgttaagcgatggtgcatgtcatgcagcaaatgttcattaaaaccaaacttgttacgtaccgcgtcaaacaatttcggcatgaaatcgaggtatttctccgtgctccacagctgctcttccggccactgtcctttggttgcgggttcataagccagacctttacctttgctcatgccgtaggtggttttcataccagggattccgcactgcacgcggatggctttgaatccaagctcttgatgacgggcataatcatccagagcttcatcaatactgtgaccggtggtatggcaataaaccatcaccccttcacgagacgcgccgccgagtaactggtaaagcggcatgttggcagctttggctttaatatcccacagcgccatatcaaccgcactaatggcgctcatcgtaaccggaccgcgacgccagtaagcacctttatagaaaaactgccagatatcttcgatacggtgcgcatcgcgaccaataagctgcggacaaaggtgatcctgcaaataagaggccacggaaagctcacgtccattgagggtggcatccccaaggcccgtaataccgtcctcagtggtgatttttaatgtgacgaaattacgccccggacaggtaacaaaaacttcagcctttacgatcttcatgttcgattccttgcatcgcttgtcgtgatgcatgaaatctacgcaactgagctactaccatacaagtataaagatcgaaaaaagccggagtgatcacaaaaaaaggcgtatatttgcgctgtgaatggttgacaaaagatgaaatagaataccttttgtcagctgacacttcctcttatcttattgataaaatggatttatgttcttacgtgcgcccccagcccgcaacaatgatcaacatgccgcaaagcgcaatcaacgcacccgtccagtcataaagagtcagtttcacgccatccacaacgcgcagccacatcaacgccgtgcagacataaacgccaccataagccgcgtaaacacgcccactcgccgctggatgcaacgttaacaaccagacaaacagcgccagactaatccccgccggaagcaacagccagatactggcgtttcgttttaaccacaaccagggcagaaagcatccaataatttcacacagcgcagtagcaaaaaatagtaacgttgttttaatcatctttgtctcttattgacatcatgtatagttatagggcgacataatatcatcaatataaacaccctcctggtacgttttgcgtccgcagtggatggtgtagaatcacctttaatcattcatacagggaatgaattatgaaaatcactctcagcaaacgaatcggcctgctcgctattctgctgccttgcgcactggcattgagcacaactgttcatgccgaaactaacaaactggtgattgagtctggcgacagtgcacaaagccgccagcacgccgctatggaaaaagagcaatggaatgacacgcgcaatctgcgccagaaagtgaataaacgcactgaaaaagagtgggataaagccgacgccgcttttgataaccgcgataaatgtgagcaaagcgccaacatcaatgcctactgggagcccaatactttgcgctgcctggaccgtcgaactggccgcgttattaccccctaacctgttattgatttaaggaatgtaaggacacgttatgccaagcgcccacagtgttaagctacgcccgctggagcgtgaagatttacgctatgtacatcaactcgacaataacgccagtgtgatgcgttactggtttgaggaaccctacgaagcctttgttgaactctctgatctgtatgataagcatattcacgatcagagcgaacggcgctttgtggtggaatgtgacggcgaaaaagccggtctggtggagctggtggaaattaaccatgttcatcgccgcgcagaatttcagataattatctccccggagtatcaggggaaaggtctggcaacccgtgccgccaaattagcaatggactatggctttaccgttctcaatctctataagctgtatctgatcgttgataaagagaatgaaaaagcgattcacatttaccgcaagcttggctttagcgttgaaggtgaattgatgcacgagttctttattaatggtcaatatcgtaatgccattcgcatgtgtatattccagcatcagtatctggcagagcacaaaacaccgggtcagactctcctgaagccgaccgcacaataacattaataataatcgatcgtatttttgatggtgtaaacccgttcgacggcgggttttactccttcatcaacaatgattagctgacagtccaccggattagcgtgactgtcatattcacagctctgttttacattaccaacccgttgattattcagtaaagtaaccgctgtgtaatctaattttttgatcggatccgtacttggcgtggcgctgacagataatgttttgtcgttacttttcgtggttttacccagcggataaccctgatcatcatagcgatattccatctgcatttgtttgctgctggctttaatcacgaagccattatcatcggtttcccaactcaccccggcagaaggtaattctgctagctggcattttccctgtaaacgtactctcttctccagcgtctcggcatcacggtaataattggcgtccagtaccagagcgaccacggtattattttccagatccagtaattcgagactatcaaaacagccttcttcgctcaaagtcccagaaacacgtttcgtcacttcaccttgctcatccattaatgtctgagtgaaatcttttaccggaccacgcagcggatcaaaatcgaattcattagagaaactggccatctcaggggtaaaactaagtgttacctctgtgcggtcacatcctgtgaggaatatcgcgagtaagcatggtagtaatttgtatttcacaacagtcaccagagagtagagatgattctcaatcatagtagcaaatacagtactttacacgttaaatgctatgcttaaagaagttatcttcgcgtaaggagcttatgatgaaactcagtacctgctgtgccgcgcttctgctcgccctcgccagtcccgcggtactcgccgcgccgggatcctgtgagcgcatacagagcgatataagtcagcgcattatcaataatggcgtacccgaaagcagcttcacgttaagtattgtacccaatgaccaggttgatcagcctgattcccaggtcgtcggccattgcgctaatgatacgcataaaattctctatacccgcaccaccagcggtaacgtctctgctcccgcgcagtctagccaggatggcgcgcctgccgaaccgcagtaacacattatcgactgaacgccggatatgacaaatccggcgatttgaacatacaacataatcccaccttattactcatacccttctattgatatggattaataattcttaacccaaaatgggtagactccctctattgttagcgcgctaaatattcaatatataaacttttatataacgataaagaacagggagtgagttatgtccaaaaatgaacgaatggtgggcatcagccgcagaacactcgttaaatctaccgcgataggttctctggcgctggctgcaggcggtttttctttgccgtttaccctgcgcaatgcagcagcagcggtacaacaggcccgcgaaaaagtggtctggggtgcctgttccgtcaactgtggtagccgctgtgcacttcgtctacatgttaaagataatgaagtgacctgggtggaaactgacaataccggcagcgatgagtacggcaaccatcaggtacgcgcctgtttgcgcggtcgctccatccgccggcgtattaatcatcccgatcgcttgaattacccaatgaaacgcgtgggcaaacgcggcgaaggcaaattcgaacggattagctgggatgaagccctggatactatcgccagtagcctgaagaaaaccgtcgaacaatatggcaatgaggctgtatatattcagtactctagcgggatcgttggcggcaatatgacccgctctagcccaagtgccagcgcggtcaaacgcctgatgaactgctacggcggtagtctcaaccagtatggctcctacagcactgcgcaaatttcctgtgccatgccctacacctacggcagtaatgatggcaacagcaccacggatattgaaaacagcaagctggtcgtgatgtttggtaacaacccggcagaaacccgcatgagcggtggtggcatcacttatcttcttgaaaaagcgcgcgagaaaagcaacgccaaaatgattgttatcgatccgcgatataccgatacggctgccggtcgtgaagacgaatggctccctattcgcccgggcaccgatgccgcgctggttgcgggtattgcctgggtattgattaacgaaaatctcgttgatcaaccttttctcgataaatactgcgtcggctatgacgaaaaaaccttacccgcagatgcacccaaaaatggtcactataaagcctatattcttggtgaaggtgacgataaaacagcgaaaacgccgcagtgggctagccaaattaccggtatcccggaggaccgtatcatcaaactggcgcgtgaaattggcacagcaaaacccgcttatatctgccagggctgggggccacaacgccaggcaaacggcgaactgactgcacgcgctattgctatgttacctattttgacgggcaatgtcggcatcagcggcggaaatagtggcgcgcgtgaaagcacctataccattaccatagaacgcctgccggtgctggataatccggtcaaaacgagtatctcctgcttcagctggacagatgctatcgatcatggtccgcaaatgacggcaatccgcgacggcgtccgcggcaaagataaactggatgtgcccattaagttcatctggaactacgcgggaaataccctcgttaatcagcattctgacatcaacaaaacgcatgaaattctgcaggacgaaagcaaatgcgaaatgattgtggtcatcgaaaactttatgaccagtagcgcaaaatatgccgacattctgctgccagacctgatgaccgttgagcaggaagatattattcctaacgactacgccggtaacatgggatatctcattttcctccagcctgtcaccagcgaaaaattcgaacgcaaaccgatttactggatcctgagtgaagtcgcgaaacgtcttggacctgacgtctatcaaaagttcacagaaggtcgcacgcaggaacaatggttacaacatctgtacgccaaaatgcttgccaaagatccggcgttaccgtcttacgacgaactgaaaaaaatgggtatctataagcgtaaagatcccaatggccattttgtcgcctacaaagcatttcgtgacgaccccgaggcaaatccacttaaaacgccttccggtaagattgaaatttattccagcaggctggcggaaattgcccgtacctgggaactggaaaaagatgaagtgataagcccattgccagtttatgccagtacctttgaaggctggaactcccctgaacgtagaaccttcccactgcaactgtttggtttccattacaaatcccgtactcacagcacctacggcaatattgatctcctgaaggctgcctgccgtcaggaggtgtggatcaaccctatagatgcgcagaaacgtgggattgccaacggcgatatggtgcgggtgtttaaccatcgtggcgaagttcggctaccagccaaagtaacaccacgtattctccctggagttagcgctatgggccagggagcctggcacgaggccaatatgtctggcgataaaatcgaccatggcggctgtgtgaatacgctaaccactctgcgccctagtccactggcgaagggaaacccgcagcacactaatctggtcgagatcgaaaaaatataacccacgacaaccataaattctggcatgacattttgtttgaaaagcaataagtgagtaatgatgaaaatccataccacagaggcgctcatgaaggctgaaatcagccgtagaagtctgatgaaaacctccgcacttggcagtcttgcgctggcaagcagtgctttcactctgccattttcccaaatggtccgggcggcagaggctccggtagaagagaaagcggtctggagttcctgcaccgttaactgcgggagccgctgtctgttacgtttgcatgtgaaagatgacaccgtgtactgggtggagtctgatacgacaggtgacgacgtctacggtaatcatcaggttcgagcgtgtttacgcgggcgctctatccgccgacggatgaatcatcctgataggttgaaatatcccatgaagcgcgtcggcaagcgcggtgaaggtaaatttgaacggataagttgggacgaagccctggataccatcagtgataatcttcggcggatcctgaaagattacggcaatgaggctgtacatgtcctgtacggaacaggcgtagatggcggaaacatcaccaacagtaacgtcccgtaccgtctgatgaactcttgcggtggttttctcagtcgctatggcagctacagtaccgcacagatcagtgccgcaatgagttatatgttcggtgccaatgatggcaacagcccggatgatatcgccaatacgaaactggtcgttatgttcggaaataacccggcagaaacgcggatgagcggcggtggtgtcacttactacgtcgagcaagcccgcgaacgtagtaacgcacgcatgatcgtcatcgatccacgttataacgacactgctgccgggcgtgaagatgaatggctgcccattcgccctggcaccgatggcgcactggcctgtgcgattgcctgggtactgattactgaaaacatggtcgatcagccatttctcgacaaatattgtgttggttacgatgaaaaaacgctgcccgccaacgcaccacgtaacgcgcattataaagcctatattctgggcgaagggcctgacggcatagctaaaacgccggaatgggcagcaaaaatcaccagcatcccggcagaaaaaattatccagttggcacgagagatcggtagtgcaaaacctgcttatatttgtcagggttgggggccacaacgacattccaacggcgagcaaacatcccgcgctattgccatgctttccgttctcaccggcaacgtcggcataaacggcggcaacagtggcgtacgcgaaggtagctgggatctgggggtagaatggttcccgatgctcgagaatcctgttaaaacgcagatttccgtctttacatggacagatgccatcgaccatggtacggaaatgaccgcgacccgtgatggtgttcgtggaaaagaaaaactggatgtccccatcaagtttttatggtgctacgccagtaacacattgatcaatcaacatggcgacatcaatcacacccatgaggtgcttcaggatgacagcaagtgcgagatgattgttggcattgaccacttcatgacggccagcgctaagtattgcgatatcctgttgcccgacctgatgccaacagagcaagaagaccttatctctcatgaatctgcagggaatatgggctatgtgatcctcgcccaacccgcaaccagtgcaaaatttgaacgcaaacccatctactggatgctgagtgaagtcgccaaacgcttaggaccagacgtttatcaaacctttactgaaggtcgcagtcagcatgaatggatcaaatatctccatgcgaaaacgaaggaacgtaaccctgagatgcccgactacgaggagatgaaaacgaccgggatctttaagaaaaaatgcccggaagaacactacgtcgctttccgcgcattccgtgaagatccacaggcaaacccgttgaaaacacctagcgggaaaatcgaaatttattctgaacgactggcgaagattgcagatacctgggaattgaaaaaagatgaaattattcatccccttcctgcgtataccccaggttttgatggctgggacgatcccctgcggaaaacctatccactgcagttaacgggcttccattacaaagcgcgtacccactccagctacggcaatattgatgtgttacagcaggcctgcccacaagaggtgtggatcaaccccattgatgctcaggcacgcggtatccgtcatggcgataccgtgcgggtatttaacaataatggagaaatgctgattgccgcaaaagtgactccgcgtattctgcctggcgttaccgccatcgggcaaggtgcgtggcttaaagcggatatgtttggtgaccgggtcgatcacggcggcagtatcaatattctgacctctcaccgccctagtccgctggcaaagggaaacccgagccacagcaatcttgtccagatcgaaaaggtttaaggagtagcccatgaccacacaatatggattttttatcgattccagccgctgtactggctgtaaaacctgcgaactggcgtgcaaagattttaaagatcttggcccggaagtcagtttccgccgtatttatgaatacgctggcggcgactggcaggaagataatggcgtctggcaccagaacgtgttcgcttattatctctccatctcctgtaaccattgcgatgaccccgcatgtacaaaagtctgccccagcggcgcaatgcataagcgtgaagatggctttgtggtggttgatgaagatgtttgtatcggctgccgctactgccacatggcttgtccgtacggcgcgccacagtacaatgctgaaaaagggcacatgacgaagtgcgatggttgttatagccgcgtcgccgaggggaaacaacccatatgtgtcgaatcctgcccgctgcgtgcacttgagttcggtccaattgaagagctgcgccagaagcacggcactcttgctgccgtcgcgccactgccgcgcgcgcatttcacaaaacccaatatcgttatcaaacctaacgccaacagccgcccgaccggcgataccactggttatctggctaatccggaggaagtgtaaaatgggaaatggatggcatgagtggccactggttatctttaccgtattgggtcaatgcgtagtaggcgcgctgattgttagcggaattggctggttcgccgccaaaaatgacgcagaccgtcagcgtattgtccgtggcatgtttttcctctggctgttgatgggcgtcgggtttattgcctctgtcatgcacctgggaagcccactgcgggcgtttaactccctgaatcgaatcggagcttctggtctgagtaacgagattgctgccggttccatattttttgccgttggcggattatggtggctggtggcagtcatcggtaaaatgccgcaagcgttggggaaactctggttacttttcagcatggcgctcggcgtcattttcgtctggatgatgacctgcgtgtatcaaatcgacaccgtgccaacctggcataacggttacactacgctggctttcttcctgacggtattgttgagcggtccaatacttgctgccgcaattctgcgggcagctcgcgttacatttaataccacaccatttgccatcattagcgttctggcgctgatcgcttgtgccggggtgattgtgctgcaaggtttgtctctggcgtctattcacagttccgtgcaacaagccagcgcactggtaccagattacgcctccttacaggtctggcgtgtggtattgttatgcgcaggtcttggatgctggctttgcccgctcattcgtcgccgtgaacctcacgttgccggacttattctggggctaatcctcatacttggcggtgagatgatcgggcgtgtgctcttttatggcctgcacatgacagtaggaatggctattgcaggttaacaaattggtgcggggcaacccgcacatttcaggatgttaggaatgacccattttagtcagcaagataatttttctgtcgcggcgcgcgtgttgggcgcgctgttttattacgctccagagagtgcggaagccgcacctctggttgcggtactcaccagtgacggctgggaaactcagtggcctctaccagaagcgagtttagcgccgctggtgacggcttttcagacacagtgtgaagagactcacgcccaggcctggcagcgtttgtttgtcggcccgtgggcactgccgtctccgccgtgggggagcgtctggctggatcgcgaatctgtgctgtttggcgatagtacattggcacttcgtcagtggatgcgcgagaaaggcattcagtttgaaatgaagcaaaacgaaccggaagatcattttggtagtctgctgttgatggctgcgtggttggcggagaatggtcgccagacagaatgcgaagaattgctggcatggcacctttttccgtggagtacacgttttcttgatgtttttatcgaaaaagcagaacaccctttctaccgtgcactgggtgaactggctcgcttaacgctggcgcaatggcaaagtcaactgttaattcctgtcgcggttaaaccgctgtttcgataagatcaccgtaatattgccggatggtgacgattacgcgcaatccggcaataataggttacagtgtcacgtttttttatctcttaaagcacgcactgcttttgcggctggcctcttttgccgcaaaatagtcgcccgtgtttcattgcccatttctgctcatgcatcatctacacatctatccggatctgcgcactatgttccaccgtctgcttatcgcaacagtcgtcggtattctcgcggcctttgccgttgccgggtttcgtcatgcgatgctgctactggagtggttgttcctcaataatgactccggcagtctggtcaatgcagcgacaaacctttccccctggcgacggttgctaactccggcgctcggcggactggcggcgggtttgttgctgatgggctggcagaaatttacccaacaacgccctcatgcgccgaccgattatatggaagcgttgcaaaccgatggacagttcgattacgcagcaagcctggttaaaagccttgcctctctgctggtagtaaccagcggcagtgcaattggtcgcgaaggtgcgatgattcttttagctgcccttgccgcctcctgttttgcccaacgttttacgccacgccaggagtggaaattatggatcgcctgtggggccgcggcgggaatggctgcggcctatcgtgccccgcttgctggcagtttatttatagccgaagtgctgtttggcactatgatgttggcctctctcggcccggtgattatttccgccgtcgtggcattgctggttagcaatctgattaatcatagcgacgcgttactctacaacgtacaactcagtgtgacggttcaggctcgtgactatgcgctgattatcagtacaggtgtgctggcaggtctgtgcggaccactgttgttaacgttaatgaacgcctgtcatcgtggatttgtgagtctcaaacttgcgccgccctggcaactggcactaggcgggttgatcgtgggtctgctttccctgttcacacctgcagtgtggggcaacggctatagcaccgtacaatcctttttaaccgccccaccactgttaatgatcattgccgggatcttcctttgtaaactgtgtgccgtgctggcgagtagcggttccggcgcacccggtggggtctttacaccgacgctatttatcggtcttgccattggcatgttgtatggtcgtagcctgggattatggttccctgatggcgaagaaattacacttttactcggattgaccgggatggcgacactgttggcggcgaccacgcacgcgccgattatgagcacgttgatgatatgtgaaatgaccggggagtatcagctactccccggtttattgattgcctgcgtaattgcgagcgtaattagccggacgttacaccgtgactctatctaccgccagcacactgcgcagcatagctaagcggatgtattgccccagttcacgctgttcggcgcgcggcagataaggcagttcaccaatgagcggtgccggaagttttttacccagcacatcaatgatttccgcataatgcgccagtcctgggttgattcggttagccacccagccaatgagcggcagcccgtcgttggcgatcgcctgagctgttagcagtgcatggttaatgcaaccttcctgaataccgacaaccatcaacaccggcagttgttcctgcactacccattcagagagtggacgcaaatcattcatcagactgcgccagccgccagtcccttctaccacgacatgatcgactttttcggtcaggtttgccaggccgttactaatgagggtgtaattgattgggcaactgtgcgccacgctactttcttcttcgcttaacgcgataggattaactgcttcataaggcagttcgatggtactaacactctgcaacaccagggcatctttattacgcagcccttcgggtgtctctttgctccccttcgctacgggtttatatcccgcaaccgtttttccctgggaggctaacgcttgtagcaatgcgcgggaaaccaccgttttccctacagaagtgtctgtaccggtaataaagaaacgcttcagcatcactaactccaccgttatgcttcacaaatataaaccaggaaaataattaaccttgaaagtctaagttatgctttcctggcccaaattgagatagcgcaaattttggtagaacagttaaaaaatgttaaccctgcaacagacgaatcaacaaagaaccgttatacatcgcgtcttttaccagtgcagcgcctgccatcgtgccctggttagaaaactgagtactctcaacgctgatgtgctgactatacgcaggaagggcctgctgacggatgctgtcactgatgaccgggaagaggatatctgccgctttacttaacggactgccaatcagtattttttgtgggttaaataaattcaccatgatggcaagaatgcgcccgacatgcgcgcccaccccggtaatgatgtcttttgccagtagatcgccgcgcaatgccgcctgacacaaactgtccacggttaacggttgtccatgtaacatgctgctcatggattgattaagacgcagctgtgccagctcaagaatactgtccacgctggcgatggtttcgaggcagccgtgattcccgcaataacagcgtttcccatacgggtcgacctgtgtgtggcctatttccacgagactactgctgcctgcgtgtagcagatgaccatcggtaatgacgcccgcccccacgttgtgatcgataaccacctgaatcacatcgcgcgccccgcgactggcaccaaacaaggcctctgccatcgtccatgcgctgatatcatgctgaatataaaccggaacgccggtatgctgctccagcgcctcgccgagcggcatctcttttacatcctcgtagaacggcatgcgatgtacaataccattttccgtatcaataattcccggcaaggttatggcaatgctagttagacgctcaagttttttctggtggcggataaaaaactgatcgatatgggaaataatacgatccagcaatggcaagtcatcttttaacgccagttcctggctctcttccaccaccagtttgctgctcagatcgcgcagagcaaggaaaatctccccgcgactaatgcgcagagaaagatagtgccaggcttcagtttcaaccaccagccccaccgccggacggccacggttccccgcttctttgatttccagctcttgcaccaggtgtgcttcgagcatctcacggacaattttagtgatactggcaggagccagttgcgccagacgggaaagatcgatacggctgactggaccaagctgatcaatcaggcgataaaccgcgcccgcgttggtctgctttatttgatcaatgtgcccaggctggttttcagcaaccaccgcatactccctatattttcgcgctccgaaataatctgtaggctatggtgaagcacttcaatacgtgtcgtcaaatttttacttaggcatgtgattaacagcacatttttcgggctttttcgctgaaatttccctcacctgagagcattcagcagatgaatacgaaagttacgcgcagccggactttgttcatgatgtttcggccagaccaaccacatttcagaaaccgcatcctcttcagcaatcggcacccagcgcatttcgttgagctgaacacgtttaaaactcgcaggcaaaatactaacacccagaccggcggaaaccagaccgatgatggtcattgcctcgcccacctcctgagtgatgacgggcgtcaaatggtaacgtcgcatcagcccgagaatatcgtcatacagccctgtcccgacgtgcggatcaaaaaagacaaagggttctttcgccagttcagccagcgttacattcgggttatttgccaggggatgatcgtgcgggatcatcgccataagcggttcatggacgatgactgcgtgttcaaggctctccggtaacgctgtgttacgcagcaatcccatatccagcgttccttcaatgagcggagcgatttgctcgcgagtgttcatttcgcgggtttgtaaatggacatcaggataatcacggcgaaacaggcttaacgtatcggacaccgcccgaataaaaggagcgctgctagtaaaaccaatgcgcaactcccccgcttcaccctgatgcagcctttcagcgcgagcggcagcgtcatccaccatagacaggatttgccgactatctgcaagaaactgttttcctgctgccgtcagcaatacactgcgattggttcgtgccagcagtcgggcaccaatttgttgctccagcgcctgaatctgctgacttagcggcggttggctaatattcaggcgggcagcggcgcgcccgaaatgcagctcttccgcaacagcaacaaagtaacgcagatgacgaagttcaatattcatatttaaaacatcttatttgagattattaatatattagacagaacaattcgattttcctaccctatgtataagcctgatctacaggcatatttagcaaggatttcaagtgagccgtactacaactgttgatggcgctccggcaagcgacactgacaagcaaagcatttctcagccaaatcaatttattaaacgcggtacgccgcaatttatgcgcgtcaccctggcgctgttctctgccggactggcaacatttgcacttctctattgtgtgcagcctatccttccggtgcttagccaggagtttggcttaacccccgcgaacagtagtattagtctgtccatttccacggcgatgttggctattggtttgctgtttactggcccgctatccgatgccattggtcgcaaaccagtgatggtcacggcgctactgttggcctccatttgtacgttacttagcacaatgatgaccagctggcacggcattttgattatgcgcgccttgattgggcttagcttaagtggcgtggcagctgttggcatgacttatcttagcgaggaaatccatcccagtttcgtggcctttagtatggggttgtatatcagcggcaacagtattggcggcatgagcggacgcttaattagcggtgtcttcacggactttttcaactggcgaattgctctggcggcaatcggttgtttcgcgctggccagcgcgttgatgttctggaaaatcctccctgaaagtcgccattttcgcccgactagcctgcgccctaagacgttgtttatcaactttcgtctgcactggcgtgaccggggattaccgttattgttcgcagaaggctttttgctgatggggagcttcgtcacgctgtttaattacatcggctatcggttgatgctctccccctggcatgtcagtcaggccgtggttggcttattaagcctggcttatttgaccggtacatggagcagtcccaaagccggaaccatgaccacccgctatgggcgtggtccagtgatgttgtttagcacgggggttatgctgtttggtttactgatgaccttattcagcagcctgtggctgatctttgccggaatgttactcttcagtgcaggattcttcgcagcccacagtgtagccagcagctggatcggcccccgcgcaaaacgcgctaaaggccaggcctccagcctgtatctgttcagttactatctggggagcagtattgccgggacgctgggtggtgttttctggcataactatggctggaacggcgtcggcgcatttattgctctgatgctggtcattgctctgctggtcgggacgcgtttgcatcgtcgtctgcacgcctgaaaaataagtccggactgcggtaaatacccgtccggacttattgccagctcaaaccaacgttaatagccatcctaaaatagacgaagcgccagccaattcccgcagcgcgtctagcgtcatcaggattataagtacccaaataaacggattcattttgctgtgtgtcatttattactgatgcgcagttattctactgctttgtaagtagtaaaatagttaacccgatcaagactactattattggtagctaaatttcccttaagtcacaatacgttattatcaacgctgtaatttattcagcgtttgtacatatcgttacacgctgaaaccaaccactcacggaagtctgccattcccagggatatagttatttcaacggccccgcagtggggttaaatgaaaaaacaaattgagggtatgacaatgaaaaaagtattagctctggttgttgccgctgctatgggtctgtcttctgccgcctttgctgcagagactacgaccacacctgctccgactgcgacgaccaccaaagcagcgccggcgaaaactacacatcataaaaaacagcataaagcagcacctgcccagaaagcgcaggcggctaaaaagcatcataaaaatacgaaagctgaacagaaagcccctgaacaaaaagcgcaggcagcgaagaaacacgccaagaaacacagccatcagcaaccggcaaaacctgctgcacaacccgcagcgtaagttttcaacagtaatgctggcgcgccccctcgcgcctgaaaattacggtgctaagcgggtaacgtttagcaccgcctttagcggagggtagtatggtgggccgttatcgctttgagttcattctgatcatccttattttatgcgcactgattaccgcccgtttttatctttcctgattgtagttatctgattttactcccactttcatcccgtcccgtctatagtatttatgagggtttgcttttaataatcataattacccaccagagtgtgatatgcgtacaaccattgctgtagtgttgggtgcaattagtttgacgtctgcttttgtgtttgcagataaaccagacgttgccagaagcgcaaacgatgaggtcagcaccctgttttttggtcatgatgatcgtgtgccagtgaatgacacgacccaaagtccgtgggatgcggttgggcaactggaaacggccagcggcaatttatgtacggcgacgctgattgcacccaatctggcattaacggcaggacactgtttattgacacctccaaagggtaaagccgataaagcagtggcgctgcgttttgtgagtaataaaggtctttggcgctatgagatccacgacatagaaggccgcgttgatccgacactgggaaagcggttaaaagcagatggggatggttggattgtacctcccgcagccgcgccgtgggacttcggattgattgtgctacgtaatcccccttctggcattacgccgttgccgttatttgagggagataaagccgcgcttaccgccgcattaaaagcggcaggtcgtaaagtgactcaggcaggctaccctgaagatcatctcgatacgttgtacagtcatcaaaactgtgaagtgactggctgggcgcaaacgagcgtgatgagtcatcagtgcgataccttgccgggtgacagcggtagccctctgatgttgcataccgatgacggctggcaattaattggggtgcaaagtagcgctcctgccgcgaaagatcgctggcgcgccgataaccgggccatttctgttaccggttttcgcgacaagctggatcaactgagccaaaaataatgttcaaacgctgcccgacagcgcgggcagcgtcttcatcaggcaagtttcaccatgatcattccagccaacagcaagaccaggccaatccagcctttacgatttaaccgttgaccaaacaagatccaacctgcggctaacgtggcggcaataccaaacccgccccacaatgcataagcgacagacaagtcgatccctttaacggcttgagaaagcgcactaaaggcagccagcaccgccgccagggagagcaagccaaatattttgcgacgaaagccgtcagaaaatttcaaaaagacgttagcaacgatttccagcacgattgccaatgccagccaggcggcgtgaacccattcaaactgcgccatggttcacctccagttcaggtttacgcgctttacgggtaccactttttatcaacacaatcccggcgaccagggtggttaacccggcaattttcatcaggcttaaactttcgtcgaataacaaaacgctaaacaaggtaataaataaaataccgataccttcccacagcgcataagctacgcctaaggcgatttttttaacggcgaaagagagaaatatatagctcagagaaatcatcaccagcattaaaataaagccgccatttccctcactgacgctcgcccatttcatactcagcgtaccggtaatttctgtagcaatagccagacctaataaaatccaataaatatacattgtccttctcctgcaagagaattattttaattttcgcttaattcagcgaaaccaaagtaaagtggtcaagccccgcgcatagcgcaagctttggcagaagaaaggactaaagcgcgttgcgccagtgctgctcacctacgagcaagatagtggatgaggtacgaagatgggtaaatgtagaaaataacgtcctgaacaaattgtccataatattacaattatccgcagtgttgcttctcgtcatcgcggatgataattgtcctcggtagttgaacacgcctgatttgtatcatagcttaagaattaactcaaaatattttcacttctttacctgagcggtttgattttcgttatgatgacggagcgaaaaagacattattattagcaaaggaagaaaaaacggggacaagcatggcaaagccgatcatcacgctcaatggcctaaaaatcgtcattatgttgggaatgctggtcattattctctgcggtatccgttttgccgccgagatcatcgtgccgtttattctcgcattatttattgctgttattcttaacccgctggtgcaacacatggtccgctggcgtgtgccgcgtgtactggcggtgagcattttgatgaccatcatcgtgatggcgatggtgttgctattagcttatctgggttccgcgctcaacgagttgacgcggacgttaccgcaatatcgcaactctattatgacgccgctgcaagcgcttgaaccgttgttgcaacgcgtagggattgacgtcagtgttgaccagctggcgcattatattgatccgaacgcggcgatgacgttgctcaccaacttattgacgcagttatctaatgccatgagtagtatatttttattgctgctgacggtgctgtttatgctgctcgaagtgccacaattgcccggaaaatttcagcaaatgatggcgcgtccggttgaagggatggcggcgattcaacgtgcgattgacagtgtttctcattatctggtgctgaaaacagccatcagcatcatcaccggcctggtcgcctgggcgatgctcgccgcactcgatgttcgcttcgcttttgtctggggattgctggcctttgcgcttaattacatcccgaatattggtagtgtcctcgcggcaatcccccctatcgctcaggtactggtgtttaatggcttctacgaagcgttgctggtgctggcgggatatctgctgattaatctggtcttcggcaatattctggagccgcgtatcatggggcgtgggctggggctttccacattggtggtatttttgagcttgattttttggggatggttgttaggaccggtgggtatgctgctttccgtgccgttgacaattattgtcaaaattgcgcttgaacaaacagcgggaggtcaaagcatcgccgttctgttaagcgatctcaataaagagtgacggcctcagcagaggccgtcagggttacagagctttcaggattgcatccacgctggctttggcgtcaccaaacagcatgtgggtgttttccttgaagaacagcgggttttgcacaccagcatagccagtgttcatgctacgtttaaagacaatcacgttctgcgctttccacacttccagcacaggcataccagcaatcggactcttcggatcatcctgcgccgccgggttaaccgtatcgttagcaccaatcaccagtacggtatcggtatcagcaaagtcatcattgatctcgtccatttccagcacgatgtcatacggtacttttgcttcagccagcaatacgttcatatgtccaggcaaacgccccgcgaccgggtggataccgaaacgcacattaataccacgagcgcgcaatttctcagtaatttcagcgacaggatattgcgcctgcgcgactgccatgccgtaccccggagtaatgatcacactatgggagtttttcagcagttccgctgtctcttctgcggtgatttcgcggtgctcacccacttcctgatcatcgccagtagaagagccgtcggtgccgaaaccacccgcaataacgctgataaaggaacggttcatcgccttacacataatgtaagaaaggatagccccgctagaaccgaccagcgcaccggtcacaatcagcaggtcgttgctgagcataaagcccgcagccgcagccgcccagccggagtagctgttcagcatgctcaccaccactggcatatctgcaccaccgatggaggcgactaaatgccagccgaataccagcgcaattgcggtcattatcagcaatgccagcacttgcaggccgacgctgtccgtgcgaacaaatacaatcagcagcaggaaggaaacgaccagagccgccaggttcattttgtgacggtttggcagcatcaatggtttagagctaatcttgccacacagtttgccgaacgccaccacgctacccgtgaacgttaccgccccgatgaagataccgaggaacacttccgtcaggtgaatattgaccagaatcggtgccattcccgcgtcatgatgcagatagctgttaaagccaaccagcactgccgccagacccacgaagctatgcaggatcgccaccagttctggcatttcggtcatttcaactttcttcgccagacggataccaattgccccaccaatgaccatcgccagcaagatccagccaacattacccgtatccggtccaaaaatggttgcgattaacgcaatcgccatcccggcgataccgaagttgttaccctggcgagacgtttcatgtttgctaagaccggccagactgaagataaacaggatcgcggcaacaatgtatgcagctgtaactaatcctccagacatatgttaccccttaatttttgcggaacattttcagcatgcgctgagtcacggtgaagccaccgaaaatattaatgctggctataagcaccgcgataaaactaaggaagctaacccagccgccctggccaatctgcaacagtgctccgacaacaataatcccactaatcgcgttggtgacgctcatcaacggtgtatgcagcgcgtggcttacattccacaccacgtaataaccgacaacgcaggccagcgcgaaaacggtgaagtgcccaaggaattctttcggcgcaacgcttgccatccagccaaaaagaatgattgccagcgccatcaacgcgtatttacgccacggactgcaggtacatttttcctcagttttcacttccggtgccgctttttgtgccgcctgcggctgagcacttacctgaatcggcggtgccggccaggtaatttcgcccgcacggatcacggtcacgccgcgaatcaccacatcatcaaaatcaacagtgatattgccgtctttctctttgcacaacagtttcagcagattaacgaggtttgtgccgtaaagctgactggattgcgtcggcagacggcccggaagatcggtataaccaatcactttgacaccattttccgtagtgaagatttcacccggcacggtgtattcacagttgccgccgttttgggctgccaggtcgacaatcacactgcccgccttcatggagtcaaccatttcacgggtaattagcttcggcgctggtttgcctggaataagcgcggtggtgacaatgatatcgacctcttttgcctgggcggcaaagagttccatttccgctttgatgaacgcgtcgctcatcactttggcatagccatcgccgctgccagcttcctctttaaaatccagctcgaggaattccgcgcccatactttgaacttgttctttcacttccgggcgggtgtcgaatgcacgcacaatcgcgccgagactgtttgctgcgccaatggcggccagacctgcaacacccgcaccaatcaccatcacttttgccggtggcactttcccggccgcagtaatttgcccggtaaagaagcgcccaaattcatgtgccgcttcaacaatggcgcgataaccggcgatgttcgccatgctgcttagtgcgtccaggctttgtgcgcgactgatacgcggcacagagtccatcgccatcacggtcacgttacgttccgcaagtttttgcattaattccggattctgcgcaggccagataaaactcaccagcgttgtcccaggattcagtaacgcaatttcatcatctaacggcgcattgaccttcagaatgatctcactctgccagacgctattcccttctacaatttcagcgcccgcttgcacaaacgctttatcgtcaaaacttgccagttgacccgcgccgctctctaccgcgacggtaaaacccagtttcagcagctgttccactgtttttggcgttgctgcaacacgggtttcattggttaaccgttctcttggtatgccaattcgcatgatattcccttccatcggttttattgatgatggtttgcctgtgtcaggagccacacaagctgctcatgtacgagctaaatgttactccgttaaaataaattagtaacaaacgccctataacgtactgaaaattatgcctgtgatctagcgccaaaaatcagtatttcggcgtgaactcgcaaaatattaacgattcagccgtgatagtgggataaacaccttagaacgccggataaagactgataattgtcttcgacggtcgggtaaaacgagacatcgccccggcacgaatcactacttaacattaaattaacttatacaattcagttgcttcagtagtaatgatgctgatacggctgttttttaagcatagacggtcatttgagcaggattaaaattggcttaaggaatgtgatatgaaaaatgacgcagacagttacaccgtttaaatgcaataatcagccacgtttctcgttaataacaataccagtacctggtttgcgcaaggcgaaggattatttttatgaagcttaagaacaccctcctggcgagcgcactgctttctgctatggcattctccgttaacgcagcaacagaactgacaccggagcaagcggcagcggttaaaccttttgaccgtatagtggttaccggtcgttttaatgctattggcgaagcggtgaaagccgtttctcgtcgcgcagataaagaaggtgccgcctctttttatgttgtcgacacttctgattttggtaacagcggtaactggcgtgtggtcgctgacctctataaagccgatgctgaaaaagcagaagaaacaagtaatcgcgtaattaacggtgttgtcgaactgccgaaagatcaggctgttctgattgaaccgtttgacacggtcaccgtccagggcttctatcgtagccagccagaagtcaatgatgccatcaccaaagcggcaaaagcgaaaggtgcctactctttctacatcgttcgtcaaatcgatgccaaccagggcggcaaccagcgtattactgcattcatctataaaaaagatgctaagaaacgtatcgtccagagcccggatgtgatcccggcagattccgaagcaggacgtgcagctctggctgccggtggcgaagccgcgaagaaagttgagatcccgggtgttgcgactaccgcaagtccaagttctgaagtcggtcgcttctttgaaacccagagtagtaaaggcgggcgttacaccgtcacgctcccggatggcactaaagtcgaagaactgaacaaagcgaccgcagcgatgatggtcccgttcgacagcatcaaattctctggcaactacggcaacatgaccgaagtctcctatcaggttgcgaaacgtgccgcgaagaaaggtgctaagtattaccacatcacccgccagtggcaggaacgtggtaataacctgaccgtcagcgcagatctgtataaataactattcagttactcctataaggcggcttgatgccgcctttcgcatttttagtcacaaatttccccgcgaccattgcatgcagacacatctcttcgtaaaatcccgcgcttcagtggcaaactccatttttatgcgttttgccctaatatttattcttcttatcacgttttaatcactggatatcgatggaaaagaaactgggactgagcgcactcaccgcgctggtattaagcagtatgctgggcgcgggtgttttcagtctgccgcaaaatatggcggcagttgccagcccggcagcactgctcatcggctggggtattactggcgctggcattttattgctggcctttgccatgctgatcctcacgcgcattcgtcccgaacttgacggcggtatctttacctatgcccgcgaagggtttggcgagctaatcggcttttgttccgcatggggatactggctgtgcgcagtcatcgccaacgtctcctatctggtgatcgttttttccgcgttaagcttttttacggacacgccggaattgcgcctgtttggcgatggtaatacctggcaaagcatagtcggtgcaagcgctttattgtggattgttcactttttgatcctgcgcggggtgcaaaccgctgccagcattaacctggtggcgacactggcaaaattgttgccgctgggtctgtttgttgtgctggcgatgatgatgttcaaactggataccttcaagctcgacttcaccggacttgcacttggcgtacccgtttgggaacaggtgaaaaacaccatgctgatcaccctgtgggttttcattggtgtggaaggtgccgtggttgtttctgcgcgtgcgcgtaataaacgtgatgttggcaaagcgacactgctggcggttctctccgctctgggcgtttacttgctggtaacgctgcttagcctgggtgtggtggcacgtcctgaactggctgaaattcgtaacccgagtatggccggtctgatggtggaaatgatgggaccatggggcgaaatcatcatcgctgccggtttgatcgtttccgtttgcggcgcgtacttaagctggaccatcatggcagcagaagtaccgttcctggccgccactcataaagcattcccgcgcatttttgcgcgccagaacgcacaagctgcgccatccgccagtctgtggttgaccaacatctgcgtgcaaatttgtctggtactcatctggctgaccggttccgattacaacacgttgctgaccatcgccagtgaaatgattctggtgccctatttcctggtcggcgcgttcttgctgaaaatcgcaacccgtccactgcataaagcggtaggtgtcggtgcctgcatttatggcttatggttattgtacgcctctggtccaatgcacttgctgttatccgttgttctgtatgcaccggggctgctggttttcctgtacgcgcgcaaaacgcatacccatgataatgtactgaaccgtcaggaaatggtgctgattggcatgctgttaattgccagtgttccggcgacctggatgctggtgggataacgttcatcccatcgttggatagcaaaggagataacgatgggtaaaacccagcccttgccaatattaattactggcggaggtcgtcgcatcggcctcgccctcgcatggcatttcattaatcaaaagcaaccggtgattgtcagctatcggacacactatccagccattgatggactgattaatgcaggtgcgcagtgtattcaggctgattttagcaccaacgacggtgtgatggcgtttgccgatgaagtactaaaaagcacccatggtctgcgtgctattttgcataacgccagtgcgtggatggcggaaaaaccgggtgcgccactggccgacgtactggcttgcatgatgcagatccacgttaataccccatacctgctcaaccatgcgctggaaagattactgcgtgggcacggacacgccgccagcgatatcattcactttaccgattatgtggtggagcgcggtagcgacaaacatattgcgtatgctgcaagcaaagcggcactggataatatgacccgcagctttgcccgcaagctggcaccggaagtgaaagtgaattctattgcgccaagcctgatcctgtttaatgaacatgatgatgccgaatatcgacaacaggcgctgaataaaagtctgatgaaaaccgcgcctggcgagaaagaagtgatcgacctggtcgattacttacttaccagttgctttgtcaccggacgcagtttcccacttgatggcggtcgtcatctgcgttaatgcagctttatccagcatataatcaacacccatgcgcttatcccccaacacgcaacagaaccaacaaaagcggcgggcaagcgcatcattccggtgaaataccacaggctcaccaggtaaacaaaatagggaataatgctccacatactaaaaatgatggttgcgcgtaaggcttcaatgccgcgttcgctggcaacaatataatgcgcgataagcgcaaaggtcgggaaaagtggaatcagcccggcgatataataatttttcgtttttgctaaaacaccaatcaacagcactaccagcgcaccgagcgcggctttgattaccagccccatctttttaccttaacacttccataacaagtcatcagtagaatacctgatgaaaacttgtttagaaacgattgatagtaagtaaaaacagcgcggtgtattgtgacgtttttatatctaccgtgaatgttatgaacactatcgtatttgtggaagatgatgcggaagtcggtagtctgattgccgcgtacctggcaaaacatgatatgcaggttaccgtagagccgcgcggcgaccaggccgaagaaaccattttgcgagaaaatccggatttggtgttactcgacatcatgctaccaggcaaggacggcatgaccatttgtcgtgatttacgcgcaaagtggtctggaccgattgttcttctaacctctctcgatagcgatatgaaccacatcctggcactggaaatgggtgcctgcgactatattctcaaaacgacgccccctgctgttttgctagcgcgtttacgtttgcatttgcgtcagaatgagcaagccacactgaccaaaggtcttcaggaaacgtctctgactccctacaaagccctgcatttcggcacgttgaccatcgatcccatcaaccgcgtagtcaccctggctaacactgaaatcagcctcagcacagctgatttcgaattattgtgggaattagctacccatgccgggcaaatcatggaccgcgatgcattgctgaaaaatttacgcggcgtcagttatgacggactggatcgtagcgtggacgtggctattagccggttaagaaaaaaactgctcgataacgccgcagaaccttatcgcattaaaactgtgcgtaacaaaggctatctttttgcgcctcatgcatgggaataagcgatgaaaaaactgtttatccagttttacctgttattgtttgtctgcttccttgtgatgtctctgctggttgggctggtgtacaaatttaccgccgaacgcgcgggcaaacagagcctggatgatttgatgaacagtagcctgtatctgatgcgcagcgaattgcgtgagatccccccacacgactggggtaaaactctgaaagagatggatttaaatctctctttcgatctgcgtgtcgagccactgagtaaataccatcttgatgatatttccatgcaccgactgcgtggcggcgaaattgtcgccctggacgatcagtacacgtttttgcagcgtatcccgcgcagccactacgtgctggcagttggtcctgttccttatctttattatctccatcagatgcgattgctggatatcgccctgatcgcttttattgctatttccctcgcctttccggtgtttatctggatgcgtccgcactggcaggatatgttaaaactggaagcagcggcgcaacgatttggcgatgggcatctcaatgaacgtatccactttgatgagggtagcagctttgaacgacttggcgtcgcatttaaccagatggcggacaatatcaacgccttaattgccagcaaaaaacagcttattgacggtatcgctcacgaactgcgaacaccgttagtgcgcctgcgttatcgactggagatgagcgataacctgagcgccgccgaatcccaggcgttgaatcgtgatatcagtcaacttgaagctttaattgaagagctgctgacttatgcccgactcgatcgcccacaaaacgagcttcatcttagcgaaccagacctgccgttgtggctgagtacgcatctggcagatattcaggcagtaacgcccgataaaacggtacggataaaaacgctcgtgcaaggccattatgcggcgttggatatgcgcttaatggagcgcgtgctggataatttgctcaataacgccctgcggtactgccatagtacggttgaaaccagcctgctactgagcgggaatagagcgacattaattgttgaggatgatggcccagggattgccccagaaaaccgcgaacatatctttgaaccttttgttcgcctcgatcccagccgggatcgcagtaccggcggctgcgggctggggctggcaattgtccactctatagcactggcaatgggcggtacggttaattgtgacaccagcgaactgggtggtgcccgcttcagctttagctggccgttatggcataacatcccgcaatttacctctgcctgacactacgcgcacgatggtcaagtcaccacgactgtgctataaaataagtatgttgtaactaaagtggttaatattatggcgcgttacgatctcgtagaccgactcaacactacctttcgccagatggaacaagagctggccatatttgccgctcatcttgagcaacacaagctattggttgcccgcgtgttctctttgccggaggtaaaaaaagaggatgagcataatccgcttaatcgtattgaggtaaaacaacatctcggcaacgacgcgcagagcctggcgttgcgtcatttccgccatttatttattcaacaacagtccgaaaatcgcagcagcaaggccgctgtccgtctgcctggcgtgttgtgttaccaggtcgataaccttagccaagcagcgttggtcagtcatattcagcacatcaataaactcaagaccacgttcgagcatatcgtcacggttgaaagtgaactccccaccgcggcacgttttgaatgggtgcatcgtcatttgccggggctgatcacccttaatgcttaccgcacgctcaccgttctgcacgaccccgccactttacgctttggttgggctaataaacatatcattaagaatttacatcgtgatgaagtcctggcacagctggaaaaaagcctgaaaagtccacgcagtgtcgcaccgtggacgcgcgaggagtggcaaagaaaactggagcgagagtatcaggatatcgctgccctgccacagaacgcgaagttaaaaatcaaacgtccggtgaaggtgcagccgattgcccgcgtctggtacaaaggagatcaaaaacaagtccaacacgcctgccctacaccactgattgcactgattaatcgggataatggcgcgggcgtgccggacgttggtgagttgttaaattacgatgccgacaatgtgcagcaccgttataaacctcaggcgcagccgcttcgtttgatcattccacggctgcacctgtatgttgcagattaacgcccggctttcatactgccgaccatctgttctggccgtacccagctgtcaaactcggcttcgctaagataccccagcgcaagggccgcagcttttaaggtcagcccttctttatgcgcttttttggcgatctcggcggctttgtcataaccaatgtgggtgttaagcgcagtcaccagcatcaggctttcattgagtaattgattgattcgctcacgattcggttcaatacccactgcgcagtgtttgttaaaactttccatgccatctgccagcaagcgcacgctttgcaggaaattgtggatcaccattggacggaagacgttcagttcaaagttaccggaagcgccccccatgttgatcgccacgtcgttccccatcacctgacagcagagcatggttaatgcctcacactgtgttgggttcactttccccggcatgatactgctgcccggctcattttccgggatactgatttcaccaattccgcagcgcgggccagaggccagccagcggacatcattggcgattttcatcagactcgcagccaaccctttcaacgcgccgtgcgcctgaaccagggcatcacaggtcgccagcgcttcaaatttgttcggcgcggtaacaaacggtgcacaggtaatgactgccagttcatctgctacgcgacgcgcatactccggatgggtatttagtccagtacccaccgctgtaccgccaagagccagttccgctacgtgaggcaggctgtattcgatatgtttgagattatgctcgagcatcgctacccagccggaaatctcctgccccagcgttaacggcgtggcatcctgcaagtgagtacgaccaattttgacgatatcggcaaaagcacgggatttctcattcagtgtctgtgtcagggttttaagctgaggaatgagttgcttgcgcagcgccagcagcgccgcaacgtgcatcgccgtcggaaagacatcgttggaactttggcttttgttcacgtcgtcgttagggtgaactttacgttccatcccgcgcacaccgccgagtaattcactggcccggttagccagcacttcgttcatgttcatgttactttgcgtgccggagccggtctgccagatagccagcgggaattcgtcgtcatgctgtcctgccagtacttcatccgccgcctgacgaatggcgctcgctttctcttcagacaacaagcctaaatcttcattaacttttgccgctgcacgcttggttagcgccagcgcatgaatcagactggtgggcattttctccgtgctaatgcggaaatgctccaggctgcgttgagtttgtgcgccccacagcttatctgccgggacatcaatcgcccccatgctatctttttcgctgcgtactgtattcatgacctgctcctcacctgattaattttttctttctgttttgctttcgttaagcaacttttagctcacttattatttaccatttgataacaaatgtttggtctttcgtgccatgtaaaaaaaccgccccgaagggcggctctgtttatttcacacagcgggtgcattgtgtgagttgtatctgctggaagaagtcatttcctttatcatccacaaggataaacgccgggaaatcttccacttcaattttccagatggcttccattcccagttccggatattcaacacattccaggctcttaatacttccctgcgccaatacagcggccggaccaccgatactgccaaggtagaagccgccgtgttttttacaggcatccgtcacctgctggctgcggttgcctttcgccagcatgatcatacttccgccctgcgcttgcagttgatcgacataagaatccatccgtccggcggtcgttgggccaagagaaccggaggcataaccttccggcgttttggccggacccgcgtagtaaatcggatgatctttgatgtactgcggcagcccttcaccgttatccatccgctctttcagtttggcgtgagcaatatcacgaccgacgataatcgtgccgttaaggcttaagcgtgtagaaacgggatactggctcaactgtgcgaggatctctttcatcggacggttaaggtcaacgcgcaccgcttcgccttctcccgctttgcgcagctcttccgggatatatttgcctggattatgttccagtttttcgatccagatcccctgacggttgatcttcgctttgatattacggtcagcagagcaggagacgcccataccgaccgggcaggatgcgccgtgacgtggcaggcgaatcacgcggatgtcgtgagcgaagtatttaccaccaaactgcgcacccagaccaagattttgcgcttcgatcagcaattctttttccagttccacatcgcggaacgcctgaccgtgctcattcccttccgttggcagttcatcatagtatttcgcggaagccagtttcaccgttttaaggttcgtttctgcagaagttccaccaataacgaacgcaatatgatacggaggacaggccgccgtacccagcgtgcgcatcttctcaaccaggtaatttttcagtttccccggcgtcagtaacgctttggtttcctgatagagatacgtcttgtttgcgctaccaccacctttggcgatacagaggaatttgtattcgtcgccatcaacggcataaagatcgatctgcgctggcagattggtgccggtattcacttctttatacatatccagcggcgcgttttggctgtagcgcagattatcttcgatataagtgttatagacaccgcgcgccagcgccgcttcatcaccaccaccggtccatacacgctgcccttttttaccaacaataatcgcggtgccggtatcctgacaggttggcagaacgcctttcgccgcgatgtcggagttacgcaggaattgcagcgccacatatttatcattttcgctggcctccgggtcacgcagaatgtcggccacctgttgttggtgcgccggacgcagcatgaagctcgcatcatgaaacgcctggcgcgccaacagagttaacgcttcgggtgcgactttcaaaatctcctgcccttcaaattcagatacgctaacgtgttcgctggttagcaggtaatactcagtatcatcttttttgagtggaaaaggagcctgataatgaaagggtttgttactcattgttctctcacttactgcctggtttggttatgctctgggcgggtgttccgttgccctgttaaaagcgagtaacaatatcctacacacttttttaacaaaaactgagactagtacgactttttgcggctccaggttacttcccgtaggattcttgctttaatagtgggattaatttccacattaaaacagggattgatcatgcaaaaactcattaacagtgtgcaaaactatgcctggggcagcaaaacggcgttgactgaactttatggtatggaaaatccgtccagccagccgatggccgagctgtggatgggcgcacatccgaaaagcagtagtcgagtgcagaatgccgccggagatatcgttagtctgcgtgatgtgattgagagtgataaaagcactctgctcggagaggccgttgccaaacgctttggcgaactgcctttcctgttcaaagtattatgcgcagcacagccactctccattcaggttcatccaaacaaacacaattctgaaatcggttttgccaaagaaaatgccgcaggtatcccgatggatgccgccgagcgtaactataaagatcctaaccacaagccggagctggtttttgcgctgacgcctttccttgcgatgaacgcgtttcgtgaattttccgagattgtctccctactccagccggtcgcaggtgcacatccggcgattgctcactttttacaacagcctgatgccgaacgtttaagcgaactgttcgccagcctgttgaatatgcagggtgaagaaaaatcccgcgcgctggcgattttaaaaagcgccctcgatagccagcagggtgaaccgtggcaaacgattcgtttaatttctgaattttacccggaagacagcggtctgttctccccgctattgctgaatgtggtgaaattgaaccctggcgaagcgatgttcctgttcgctgaaacaccgcacgcttacctgcaaggcgtggcgctggaagtgatggcaaactccgataacgtgctgcgtgcgggtctgacgcctaaatacattgatattccggaactggttgccaatgtgaaattcgaagccaaaccggctaaccagttgttgacccagccggtgaaacaaggtgcagaactggacttcccgattccagtggatgattttgccttcagcctgcatgaccttagtgataaagaaaccaccattagccagcagagtgccgccattttgttctgcgtcgaaggcgatgcaacgttgtggaaaggttctcagcagttacagcttaaaccgggtgaaagtgcgtttattgccgccaacgaaagtccggtgactgtcaaaggccacggccgtttagcgcgtgtttacaacaagctgtaagagcttactgaaaaaattaacatctcttgctaagcttattaaaggcttataacaccttcaggcggccagtccgcctgatttcattttatggataatcattatgaataaaagcctggtagcggtaggcgtcattgttgcgctaggcgtagtctggacaggcggcgcatggtatacaggcaagaagattgaaacccatctcgaagacatggtcgcgcaggcgaacgcgcaactcaaactgacagctcctgaatccaacctggaagtgagttatcaaaactatcatcgcggcgtattcagcagccagttgcaactgttggtgaaacccattgccgggaaagaaaatccgtggattaaaagcggtcagagcgtcatcttcaacgaaagcgttgatcatggtcccttcccgcttgcccagcttaaaaaactgaacctgatcccgagcatggcaagtattcaaaccacgctggttaataacgaagtaagcaaaccactgtttgatatggcaaaaggtgaaacgccttttgagattaacagccgcattggttacagcggtgattccagttccgatattagcctcaagccactgaattacgagcaaaaggatgaaaaagtcgcctttagcggcggcgagttccagttaaatgctgacagagacggcaaagccatctccctttccggggaggcgcaaagtggtcggatagacgcagttaacgaatacaaccagaaagtgcagttgacctttaataatctgaaaaccgacggttccagcacgctggcaagttttggtgagcgtgtaggaaatcaaaaactgagtctggaaaaaatgaccattagtgtggaaggcaaagaactggcactgctggaaggcatggagatcagcggtaaaagcgatctggtcaatgacggtaaaacgatcaatagccaactggattacagcctaaacagcctgaaggtacagaatcaggatctgggcagcggcaagctgactttaaaagtcggccagattgatggtgaagcctggcatcagtttagccagcaatataacgcgcaaactcaggcgctgctggcacagccagaaattgccaacaaccccgaactttatcaggagaaagtgacggaagccttctttagcgccctgccgctgatgctgaaaggcgatccggtgattactatcgcgccgctaagctggaaaaacagtcagggtgaaagtgccctgaatctgagcctgttcctgaaagatccggcaacgactaaagaagcgccgcaaacgctggcgcaggaagtagatcgtagcgttaaatctctggatgcgaaactgaccattccggtggatatggcaactgagtttatgactcaggtagcgaagctggaaggttatcaggaagatcaagcgaaaaaactggcgaaacagcaagttgaaggtgcaagtgcaatggggcagatgttccgtctgaccaccttgcaggacaataccatcaccaccagcctgcaatatgctaacggtcagataacgttaaatgggcagaaaatgagcttagaagattttgttggcatgtttgcgatgccagctcttaacgttccggctgtaccggcaattccgcagcagtaattcacggccaaaacgccggagaattttcactccggcgttttcatctgaaaacaaaccagagattgcctgatgcgctacgcttatcaggcctaccttttcctgcaacactttgaatttatgagtttttgtaggctggataaggcgtttacgccgcatccggcataaaaaacgcgcactttgtcaacaatctgaaacgccggagatttttctctccggcgttattttttacttcagcataaagtcatactgaatactcattttcacatcccagtaattcaggcgatcgcccagcgtactgccatcgcgcttttcccgccctttatcggcagcaagaaagaaattcatcccttgtaacggcccttcgctgacccgatagttcataccacctaagatacccgtgccttcaatccgcacatctcgtttactggattcatagccgcgagtcacaatcggtgcaaatgtcagcgtaaattgcggcgttaaacgatagttgacgcccaattgccaggactgcattccttcacggttacgatcaagacttaaactaaagggatagccaatgtcggtatccaccacggcaccattcattgcatggcgcaaataaccaccactgccaaatacacttccccacggcgcattccaggtcaattgtccactaaccaacgccgtttcattgggctggctggtattacgacttaaaccttcgagctgcgcgtaaaagccgagcaactcccctttcaacgtataattcgggtcgagcggtatgcttttctcgagaatactttgtatctgattggaaacatctttctgtacgcttgcccccagagaatagcgactggtatcatcatgccaactggcggctaaaaaagaacgtgcgcgatgtttatcgtattttcccgtctggctgttatacaccccttcatcacgaataccggttgtactatcagtccataaaaatactcgactacgccacattccccacagatcaatatttggtgttaaagcccaataacctaatgctccttcagaaactgtcggtaatgtacgttggctactgccagccattaacggaatacgataaggtaagctaccataactataatccgtcccgaagcgacctaatttaagcaggctattttcactgggttttatttttactgcccccagggcaaagccaaaacttttatcaccatcaagataccaccgggtactcatatcagcacgagcacctaatttataaacataatacgccccgccttcaacgccaataatattggaataataaccactattgaaatcgagcaatcctccctgtacccatgcgtaaatatctcttcccgcgccagcactgggcttatccgccctgcgcaattcgtttttcagtctgatgcgtagtcccgcttcatcgtcagccagttgcgccgcataagcagaggtaaggccagaggcagccgtcaggcaaataacggccatggccactatttttctcatagttgcacctttgatgttctgattatttttattgaatattaattagtgatatcgctgattaattgctgctgcacttttttacgattatcaatttcaaccacgatttctttgaattttttatccgtgagcggataaaaccagataataacgaatgccagtagcataaatccgcaaggtactaaggcaatacttgtgcggatgcccataataacttccggcgtttgcacctgattggcgatatatccgcttaaccccaaaataaaggcaggaatactacctccgattgcctgaccgcatttacgggtaaaactgaatagactataggtgagcccttcaattcgcacgccggtcaggtattcaccgtattctacggtatcagcttccagcgcccacatcacggtcatggtaacgccctgaccaatactagcgatggccaacgcaaccaacgccaccggcagactccagacggaaacccagaagaacagcagataaccgcaggttcccagcaaagcgccaatcaggaaggtattctttttaccgatcctcgcgaccatccccggcaccagcggtgcgcttgccacagtaccaaccaggttttgcaccagtaccagcacagtgaacagcccggtatcatttaacacatagcgcacgtagaacaagctgctggcgctgaccgcaaaggtgctaatcagcacacacagcgcaccgatgcacaacataaacagcgggcgattccgtttcagggtttgcagactgatattcaaactcggctgcgcaacgatacgtaccacattctcacgcgtgcttttgaagcagatgaagtaaagcaccattccggcaatcgccagcacaattgtccagaaatggtatacgctcaccatctcttccgggctggagttcttaatgctcggtcctatcagaaatgccaggcagacaaaggtcaaactagcggcaatcccacgagccgcgcccagacgggcgcgggattgtggttgttgggtcatcgcggtagcaagactaccataaggaatattcaccaggctgtagcaaagcccgaggcccatgtaggtcaaatatgcatacaccactttgctaccatggctccagtcggtcagcacccagaataccagcacgctgaagatcattaacggcgcagtaccgaagagtaaaaacgggcggaattttccccagcgggtattcacactgtccaccactcgtccggcaaagacgtcggcgaaggcatcgaatacccgcaccagtaacagcatggtgcccgccgcagcggcaccgacgccagcgacgtcggtgtagtaactcaacaggaagagcgcccccattgcgaaggcgaagttattggcgacgtcaccgaggctgtagccgacgatggtgcgccaggagagttgttgattcattgtttgcctccctgctgcggtttttcaccgaagttcatgccagtccagcgtttttgcagcagaaaagccgcgctcttcggtttgcggtcgcgagtgaagatccctttcttgttaccgccaacgcgcaatatgccttggctggtcgcaaaatcggcgaaattccatacctgttcaccgacgacggcgctgacgcgatcaaagacgcggtgatacatatccagccatgcacactgatactcttcactccacatgtcggtgtacatactgtgcagcccggctaacgtatccacgccgtattcggtgatgataatcggctgatgcagtttctcctgccaggccagaagttctttttccagtaccttctctgccgtttccaaatcgccgctttggacataccatccgtaataacggttcaggcacagcacatcaaagagatcgctgatggtatcggtgtgagcgtcgcagaacattacattgacgcaggtgatcggacgcgtcgggtcgagtttacgcgttgcttccgccagtggcgcgaaatattcccgtgcaccttgcggacgggtatccggttcgttggcaatactccacatcaccacgcttgggtggtttttgtcacgcgctatcagctctttaatcgcctgtaagtgcgcttgctgagtttccccgttgactgcctcttcgctgtacagttctttcggcttgttgcccgcttcgaaaccaatgcctaaagagaggttaaagccgacagcagcagtttcatcaatcaccacgatgccatgttcatctgcccagtcgagcatctcttcagcgtaagggtaatggctggtacggtaggagttggccccaatccagtccattaatgcgtggtcgtgcaccatcagcacgttatcgaatcctttgccacgcaagtccgcatcttcatgacgaccaaagccagtaaagtagaacggtttgtggttaatcaggaactgttcgcccttcactgccacactccggatgccgacgcgaagcgggtagatatcacactctgtctggcttttggctgtgacgcacagttcatagagataaccttcacccggttgccagaggtgcggattcaccacttgcaaagtcccgctagtgccttgtccagttgcaaccacctgttgatccgcatcacgcagttcaacgctgacatcaccattggccaccacctgccagtcaacagacgcgtggttacagtcttgcgcgacatgcgtcaccacggtgatatcgtccacccaggtgttcggcgtggtgtagagcattacgctgcgatggatcccggcatagttaaagaaatcatggaagtaagactgctttttcttgccgttttcgtcggtaatcaccattcccggcgggatagtctgccagttcagttcgttgttcacacaaacggtgatacgtacacttttcccggcaataacatacggcgtgacatcggcttcaaatggcgtatagccgccctgatgctccatcacttcctgattattgacccacactttgccgtaatgagtgaccgcatcgaaacgcagcacgatacgctggcctgcccaacctttcggtataaagacttcgcgctgataccagacgttgcccgcataattacgaatatctgcatcggcgaactgatcgttaaaactgcctggcacagcaattgcccggctttcttgtaacgcgctttcccaccaacgctgatcaattccacagttttcgcgatccagactgaatgcccacaggccgtcgagttttttgatttcacgggttggggtttctacaggacgtaacataagggactcctcattaagataataatactggtcaacctttaatctgattagttaaccaattctgtgttgcacacagttatctgtgagaaacccatggaagagaaatggaaataaaaagaactgacaccgcgatcaaaaaaccaaaaactgcaatacccacagcgtgatatagatcgcattaatctttaaaacagcgttgacagaagccataaaataagcaaccgaacgttcgttcgagcgtattgggaacgataaactctcatgacatatggctacagtgaatattttggggggaattctccgaagccgggaaggataatttttgcacagagaaattacgatatgaaacgcgggcacagttatcaccagcccgccgaaaaagagagagaatcaggatgcggttaagataccgccaatcatcgcgcgtaatccctgagcaaagctcgcttcacgcgccaggtcttccgcttcgatatcggccagtacaccgtaggtcagatccagcagtaaacgactagtcattgccgtgttgatgtctgggcttatctcgcctttttgctgggcatcacgcatccgctgggcaacaaattccgtgatcgtcatatgcttatttttaagcatggcggcgacctgtgggttacgcatcccttccgccataatttcaaccaccagcgcccgttgtccaaaggcttcatgggtgagagagacaatggactcgaccatatagtcaacgaaatgaatcccttcaatcggttcccggaaacgggccagcgccctctcctggtcctgtaagataatcgcctgaatcaaggcttctttggagatgaaatggtgatagagcgtcccgggactaatggcgcaagatttacagatggctttcatgctggcactgtgaaatccattttcactaaaaatctctctggcagcattgaggatccgggtccgtgtcggttgtgcttcagtctgcatgttatccatcattaaaccattatagttagcgtgaataactagtttaccgcgttgtcaggtgagcgcctatcattgctgttgaatagtgcgaaggcacactctattcgtatacttttcactctgaaattggttaaccaatagccgtgatttggctgccagttatttagcagagacgttgatgagtttatcccggtaaacaacacgcacggttgtttaccggtccgttagtgtattaattgagctcctgtaccccaccaccggagacggtgagaatttgtccgcttacccagctcgcagcagggctgcaaaggaacagcgctgcgttagcaatatcttgcggttggcccagacgtctgatcggcgtgtgctgtaacattttttgttcaatttctggtgtaataacggatttcagggcatcggttaatattgcccccggcgcaatgccatttacccgaatatttttttcacccaggtcaaacgccatatttctgaccagatgactggccgcagctttagaacttgcataggaagtcatgtttatatttttattttctgccgccatagaagtgatggtcagaataacgccaccgccatttttttccatttctggcgcaacaagttgactcagatggaaaaaagaaaacacattcagttcataagcacggcgaaaatccgccattggcatatcaaacggtttaggtccaccgccaccggcgttgttaaccagaatatcaactttacccagcttactgatagcaaagtctgccagtgcagagagttcctgttcggaagtaatatcacaacggcaggcaaatgcctgaccacccagttgttgaatttcgtctacaacatggttagctgcgtcggcgttaatatcactgaccaccacagatgcgccagctgtcgcgaatgtaatggcgatttctttaccaatacctgcacccgcacctgtgatgatggcgcattttccgtcgagtctcaggttgtcagaattaaacacataaacctcctgtgaacttcagtaaaaataaaaggcaccgcctgtgtgccacattttttatcattaaccttgaggaaaggacactaccaggtatagcagataaagagaggattatttcgctgcaatgagccgggcgggaataataagattgcgactatgcgtctcttcatgggtgattttttgcatcatgcgatccgcaagtgtgataccaagttcccgcgctggcgtgctggcccaggtaacaggtatatcatcaagtgtggttggtgtcgcatcggtaaatgccgccaggctaacctgttgctcaaagtaacgatcgactccgctttccccgctttgccgccctgctttgagcaaaccaaaccatgcccccatcgcaatagtttcgttatagcaaaccacggcactgatggtcgggttatgacgtaaaagcgccgtgatagcttccgcggcttgcttctggctggaagtgcactccaacacccaatcgctatgaaacggcaggccaaattttagtagagttgcacaatagcccccaacccgttctgcacgggttaaactggaactttgccctcccagccaggcgatccgctgatgcccattgcgaatgagatgctccgtcaacaactgtgcagcctgcatgttgtccgggcgaaccgtatcaacatcatcaagataactggcacgggaagcgaaaatcaccgggatagctttttcttctgccatccgtcgcaggtcatcgctacttcctgcagctccggcaattaccacaccatcgacaccctgattcagtaacagactaaaccgctgtgccagctgctcaccgtctttaccgccgtgaagcaaaaaaaccatccgtccctgcgcttccagagcttccgtcaatccggccgtcaattcggcgtaaaacggcgcagataaatcacggacgatcaaaccaatgacgccgctttgcccgccgcgcagcgcgctcgcctggcgattgcgcacaaatcccagctcttcaatggcggcgttaacgcgttctcctgtggcggtagagattcgccctttgccactaagcaccaggctaacggtacttacgctcacgcccgcagccagcgcaacatcatgaatggttatttttttggcggtagccatgcagatgacctactccctgattatgtgacagataaaacgttttaccttttatttatcttatacccgctattatcgttgcgtaatgtgatttatgcctcactaaaatttgataaaacgttttatcttctcgcgcaatttactgaatccagattgttctctacgaggagtcgttttatgacggcgaaaacagcaccgaaagtcacgctgtgggagttcttccagcagttaggcaaaaccttcatgttacccgtggcattattgagcttctgcggcattatgctcggcattggtagttctcttagcagccatgatgtcataaccctgatcccggtcctgggcaaccccgtgttgcaggctatctttacctggatgagtaagattggcagctttgcttttagtttcctgcctgtcatgttctgtatcgccatcccgctgggcctggcacgcgaaaataaaggcgtagcggcattcgctggcttcatcggttatgcggtaatgaacctcgcggtaaacttctggttgaccaataaaggcattctgccaaccacggatgccgcggttctgaaagccaataacatccagagcattcttgggatccagagcatcgataccgggatcctcggtgcggtgatcgccggtattatcgtctggatgctgcatgagcgtttccataatatccgcctgccggatgcgctggcattcttcggcggtacgcgcttcgtaccaattatctccagcctggtgatgggccttgtcggcctggtgattccattagtctggccgattttcgccatgggtattagcggcttgggccatatgataaacagcgcgggtgatttcggaccgatgctgtttggtaccggtgaacgtctgctgttgccgtttggtctgcatcacattctggtggcattaattcgctttaccgacgcaggcggcacgcaggaagtctgcggtcaaaccgtcagcggcgcactgaccatcttccaggcgcaattgagttgcccgaccactcacggtttttctgaaagcgccacgcgtttccttagccaaggtaaaatgcctgcgtttctcggcggtctgccaggtgcagcgttagctatgtatcactgcgcgcgcccggaaaatcgccataaaattaaaggtctgctgatttctggcctgatcgcctgcgtcgttggcggcactaccgaaccgctggaattcctgttcctgttcgtagcgccagttctgtatgtcatccacgcgctgttaaccggcctcggcttcaccgtcatgtctgtgctcggcgtcaccatcggtaataccgacggcaatatcatcgacttcgtggtgttcggtattttgcatggtctgagtaccaagtggtacatggtgccagtggtggcggcaatctggtttgtcgtttactacgtcatcttccgtttcgctatcacccgcttcaatctgaaaaccccggggcgcgatagcgaagttgccagcagtatcgaaaaagccgttgccggtgcgccgggtaaaagtggttacaacgttcctgcaatcctcgaagcattaggcggtgccgacaatattgtcagcctcgataactgcattacccgtctgcgtttgtctgtgaaagatatgagccttgttaatgtgcaggcactgaaggacaatcgggcaattggcgtagtacaacttaatcaacataacctgcaggttgttatcgggccacaagttcagagtgtaaaagatgaaatggccggtctgatgcatactgtccaggcataaggataagatatgttcgattttagtaaggtcgtggatcgtcatggcacatggtgtacacagtgggattatgtcgctgaccgtttcggcactgctgacctgttaccgttcacgattagtgacatggattttgccactgccccctgcattatcgaggcgctgaatcagcgcctgatgcacggcgtatttggctacagccgctggaaaaacgatgagtttctcgcggctattgcccactggttttccacccagcattacaccgccatcgattctcagacggtggtgtatggcccttctgtcatctatatggttagtaaactgattcgtcagtggtctgaaacaggtgaaggcgtggtgatccacacacccgcctatgacgcattttacaaggccattgaaggtaaccagcgcacagtaatgcccgttgctttagagaagcaggctgatggttggttttgcgatatgggcaagttggaagccgtgttggcgaaaccagaatgtaaaattatgctcctgtgtagcccacagaatcctaccgggaaagtgtggacgtgcgatgagctggagatcatggctgacctgtgcgagcgtcatggtgtgcgggttatttccgatgaaatccatatggatatggtttggggcgagcagccgcatattccctggagtaatgtggctcgcggagactgggcgttgctaacgagcggcagcaaaagtttcaatattcccgccctgaccggtgcttacgggattatagaaaatagcagtagccgcgatgcctatttaagcgcactgaaaggccgtgatgggctttcttcccctagcgtactggcgttaactgcccatatcgccgcctatcagcaaggcgcgccgtggctggatgccttacgcatctatctgaaagataacctgacgtatatcgcagataaaatgaacgccgcgtttcctgaactcaactggcagatcccacaatccacttatctggcatggcttgatttacgtccgttgaatattgacgacaacgcgttgcaaaaagcacttatcgaacaagaaaaagtcgcgatcatgccggggtatacctacggtgaagaaggtcgtggttttgtccgtctcaatgccggctgcccacgtagcaaactggaaaaaggtgtggctggattaattaacgccatccgcgctgttcgttaaccccaattgcgcaacgtaaaaaatcgttgcgcaatcgtggatttttaccctgctttgtttttataatggtgcgcacttttatatccagaaaaagagtgcgaccatgattgataccaccctgccattaactgatatccatcgccaccttgatggcaacattcgtccccagaccattcttgaacttggccgccagtataatatcagccttcctgcacaatccctggaaacactgattccccacgttcaggtcattgccaacgaacccgatctggtgagctttctgaccaaacttgactggggcgttaaagttctcgcctctcttgatgcctgtcgccgcgtggcatttgaaaacattgaagatgcagcccgtcacggcctgcactatgtcgagctgcgttttagtccaggctacatggcaatggcacatcagctgcctgtagcgggtgttgtcgaagcggtgatcgatggcgtacgtgaaggttgccgcacctttggtgtgcaggcgaagcttatcggcattatgagccggaccttcggcgaagccgcctgtcagcaagagctggaggcctttttagcccaccgtgaccagattaccgcacttgatttagccggtgatgaacttggtttcccgggaagtctgttcctttctcacttcaaccgcgcgcgtgatgcgggctggcatattaccgtccatgcaggcgaagctgccgggccggaaagcatctggcaggcgattcgtgaactgggtgcggagcgtattggacatggcgtaaaagccattgaagatcgggcgctgatggattttctcgccgagcaacaaattggtattgaatcctgtctgacctccaatattcagaccagcaccgtagcagagctggctgcacatccgctgaaaacgttccttgagcatggcattcgtgccagcattaacactgacgatcccggcgtacagggagtggatatcattcacgaatataccgttgccgcgccagctgctgggttatcccgcgagcaaatccgccaggcacagattaatggtctggaaatggctttcctcagcgctgaggaaaaacgcgcactgcgagaaaaagtcgccgcgaagtaacaaaatggatggtgcaaatgcaccatccatttttcatgcaaggcacaaagtcgcgcgatgtttggcggattcgatgcccagctcaatcaactccattacctggattgcctggcttgccggaaccggattttcaccatcgccatttaacgcatcacgaatagccgcatagtaagccggataattcccaggcaccgtcaacagcgtttcttcgacacgttcctcaccttccacgcgggtaagtacgccatcacgcatatcgtagccccagtcttcctgcggtagacgctcgccatttttcagacgttcttcctgtggatcgaggccatatttcacataactgcctcgggatccatgcacgatataccgtgcactctcagcggctgccagcatggtaccgtgtaaaatgactcgccgctgtggataggacaagatggcgtggaaataatcggtgctctgcgctccgggccgtaactgtgccaaatctaccgtcatgctgaccggtaaaccaaaaagcgtaatggcctgatcaagaagatgtggtgctaaatcgtaccagataccgctgcctgggccgccctgttcacgccaacgatcgcgcacctgcggacggaagcggtcaaaatgagactcaaagtaagcaacttcacccagcacgccttccgcgagtaaaccttttagcgtcaagaaatcgctatcccagcgacggttatggaatacagacagcacacgccccaggctttttgccagcgcatccagctctcgcgcttgactcagtgtcacggtaaagggtttatcaacgaccacatgtttacccgcctcaagcgccgctttggctaacgggaaatgggtatcgttgggtgtaggaatgacaatcaggtctatgttgggatcgttaaacagatgcttcggctcagagacaaccgtaaccgttggccagtcggcttttacttttgtttcatcactgctggagattaccgccagttcctgcccgggcgtgcccgcaatcaggggcgcatggaaggttttgctcgcataaccatacccaatcaacccaacacggatgttgtcgctcatgtcattgcctctcattgaagtatgatggctatttgacactatcctttacccacgctcaacagtttaataacctgccagcaataagggatgttgtttaacttaagtcaaaaaaatagcgaattttccaacgacaaaagctaaatatcgcaaaaacctcagtaaaaatcttgctggagctattattgctaagtaacatttaccccctgaagttaatggatcaatcaagagagatgtgggctgtaatgaatcgtcttattgaattaacaggttggatcgttcttgtcgttagtgtcattcttcttggcgtggcgagtcacattgacaactatcagccacctgaacagagtgctagcgtacaacacaagtaagctctgcacttgtggagcgacatgctgcccgtccgggtgcatgttttcacttgtcggatattaaaccaggaatttattatcttgttcgatgttgttggtgattgtcagggatagtaaagcgcgttactcttttcagagcagtttttcatccctgaatatttgccatcagcgcattcttattattgtaataacacaagcgttcacttttggtgaaattttatcatcactaataatacctacccctttggtattaattattttatggaccttttatgactgttcaggactacttattaaaatttcgcaaaatcagtagtctcgaaagtctggaaaaactctacgaccatcttaattacaccctgacggacgatcaggaactgatcaatatgtatcgtgctgccgatcaccgtcgcgcagagctggtttctggcgggcgtttgtttgacctcggccaggtaccgaagtccgtctggcactatgtccaataaagaaagtagcgatcggttataaaagccttataataacgcccctaaaattagatttgcctgtttgcgtcgctattctggagaacctatgaccaccacaacgccacaacgtattggaggctggttgcttggcccgttggcctggcttttagtcgctctgttgagtacgacgctggcgttgttgctgtataccgctgcgttatcttctccgcaaacatttcaaacgctcggcggacaagcactgacgacacaaatcttatggggcgtttcttttattaccgctatcgccttgtggtattacacactgtggttgaccatcgctttctttaaacgtcggcgttgtgttcctaaacactatattatctggctgcttatttccgtattgctggcagtaaaagcattcgcttttagtcccgtggaagatggcatagccgttcgccagttgctgtttactttgttggcaaccgcattgatcgtcccctatttcaaacgcagcagccgggtaaaagcgacgtttgtgaatccgtaataaccttacagttaacctgttgtcgcctgctctggattaacggataataggcggcttttttatttcaggccgaaaaatgactgactacctgttactgtttgtcggaactgtactggtcaataactttgtactggtcaagtttctcggtctctgtccgtttatgggggtttccaaaaaactggaaaccgcgatgggcatggggctggcaacaacgtttgtgatgacgctggcgtctatttgcgcctggcttatcgatacgtggattttgatcccacttaatctgatttacctgcgcaccctggcatttattctggtgattgctgtggtcgtgcagttcaccgagatggtggtgcgcaaaaccagcccggtgctttaccgtctgctggggatttttttgccgcttatcaccaccaactgtgcagtgctcggcgtggcgttgctgaatatcaatctcgggcacaatttcttgcagagcgcgctgtacggtttttccgccgctgtcggtttcagcctggtgatggtgctcttcgccgccatccgcgaacgccttgctgtggctgatgtcccggcaccttttcgcggtaatgccattgcgttaattaccgcaggtcttatgtctctggcctttatgggctttagtggtttggtgaagttgtaatgaatgctatctggattgccgttgccgccgtgagcctgctgggcctggcgtttggcgccattctgggttatgcctcccgccgttttgcggtggaagacgatccggtcgttgagaaaattgacgaaatcttaccgcagagccagtgtggtcagtgcggttatcccggctgtcgcccctacgcggaagccatcagctgtaacggtgaaaaaatcaaccgttgcgccccaggtggcgaagctgtgatgctaaaaattgccgagttgcttaatgtcgagccgcagccgctggatggcgaagcgcaagagataacgcctgcgcggatggtggcggttattgatgaaaataactgtattggctgcactaaatgtattcaggcgtgtccggtagacgccatcgttggcgctacccgtgccatgcatacggtaatgagtgatctctgtacgggctgcaatttatgtgttgatccgtgcccgacgcactgcatcagcttgcaaccggtcgcagaaacacctgactcctggaaatgggatctgaacaccattcccgtgcgtatcattcccgtggaacaccatgcttaagttattctctgcattcagaaaaaataaaatctgggatttcaacggcggcatccatccaccggagatgaaaacccagtccaacggtacacccctgcgccaggtacccctggcgcagcgttttgttattccactgaaacagcatattggcgctgaaggtgagttgtgcgttagcgtcggcgataaagtattgcgcggccagccgcttacccgtggtcgcggcaaaatgctgcctgttcacgcgcccaccagcggtaccgttacggctattgcgccccactctacggctcatcctagtgctttagctgaattaagcgtgattattgatgccgatggtgaagactgctggatcccgcgcgacggctgggccgattatcgcactcgcagtcgcgaagagttaatcgagcgcatacatcagtttggtgttgccgggctgggcggtgcaggattcccgacaggcgttaaattgcagggtggcggagataagattgaaacgttgattatcaacgcggctgagtgcgagccgtacattaccgccgatgaccgtttgatgcaggattgcgcggctcaggtcgtagagggtattcgcattcttgcgcatattctgcagccacgcgaaattcttatcggcattgaagataacaaaccgcaggcgatttccatgctgcgcgcggtgctggcggactctaacgatatttctctgcgggtgattccaaccaaatatccttctggcggtgctaaacaattaacctacattctgaccgggaagcaggttccacatggcgggcgtagttccgatatcggcgtattaatgcaaaacgtcggcactgcttatgcagtgaaacgtgccgttattgatggcgagccgattaccgagcgtgttgtaaccctgactggcgaagcaatcgctcgcccgggcaacgtctgggcacggctggggacgccagtgcgtcatttattgaatgatgccggattctgcccctctgccgatcaaatggtgattatgggtggcccgctaatgggctttaccttgccatggctggatgtcccggtcgtaaagattaccaactgtctgttggctccctctgccaatgaacttggcgaaccacaggaagaacaaagctgcatccggtgtagcgcctgtgctgacgcctgccctgcggatcttttgccgcaacagttgtactggttcagcaaaggtcagcaacacgataaagctaccacgcataacattgctgattgcattgaatgtggggcttgcgcgtgggtttgcccgagcaatattcccctggtgcaatatttccgtcaggaaaaagctgaaattgcggctattcgtcaggaagaaaagcgcgccgcagaagccaaagcgcgtttcgaagcgcgccaggctcgtctggagcgcgaaaaagcggctcgccttgaacgacataagagcgcagccgttcaacctgcagccaaagataaagatgcgattgctgccgctctggcgcgggtgaaagagaaacaggcccaggctacacagcctattgtgattaaagcgggcgaacgcccggataacagtgcaattattgcagcacgggaagcccgtaaagcgcaagccagagcgaaacaggcagaactgcagcaaactaacgacgcagcaaccgttgctgatccacgtaaaactgccgttgaagcagctatcgcccgcgccaaagcgcgcaagctggaacagcaacaggctaatgcggaaccagaacaacaggtcgatccgcgcaaagccgccgtcgaagccgctattgcccgtgccaaagcgcgcaagctggaacagcaacaggctaatgcggaaccagaagaacaggtcgatccgcgcaaagccgccgtcgaagccgctattgcccgtgccaaagcacgcaagctggaacagcaacaggctaatgccgagccagaacaacaggtcgatccgcgcaaagccgccgtcgaagccgctattgcccgagccaaagcgcgcaaacgggaacagcaaccggctaatgcggagccagaagaacaggttgatccgcgcaaagctgccgtcgaagcggctattgcacgcgccaaagcacgcaagctggaacagcaacaggctaatgcggtaccagaagaacaggttgatccgcgcaaagcggcagttgccgcggctattgcccgcgctcaggccaaaaaagccgcccagcagaaggttgtaaacgaggactaaatggtattcagaatagctagctccccttatacccataaccagcgccagacaagccgcattatgctgttggtgttgctcgcagccgtgccaggaatcgcagcgcaactgtggttttttggttggggtactctcgttcagatcctgttggcaagcgttagtgctctgttagccgaagctctcgtactcaaactacgcaagcagagcgtagccgcagcgttgaaagataacagtgcattgctgacaggcttattgctggcggtaagtattccccccctcgcgccatggtggatggtcgtgctgggtacggtgtttgcggtgatcatcgctaaacagttgtatggcggtctgggacaaaacccgtttaatccggcaatgattggttatgtggtcttactgatctccttccccgtgcagatgaccagctggttaccgccacatgaaattgcggtcaacatccctggttttatcgacgccatccaggttatttttagcggtcataccgccagtggtggtgatatgaacacactacgcttaggtattgatggcattagtcaggcgacaccgctggatacatttaaaacctctgtccgtgccggtcatagcgttgaacagattatgcaatatccgatctacagcggtattctggcgggcgctggttggcaatgggtaaatctcgcctggctggctggcggcgtatggttgctatggcagaaagcgattcgctggcatattcccctcagcttcttagtaacgctggcgttatgcgcaatgttgggctggttgttcagtccagaaacactggcagcaccgcaaattcatctgctgtctggagcgaccatgctcggcgcattctttattttgactgacccggttaccgcttctacgaccaatcgtggtcgtcttattttcggcgcgcttgcgggcttattagtctggttgatccgcagtttcggcggctatcctgacggcgtggcttttgccgtcctgctggcgaacatcacggttcctctgatcgattactacacgcgtccgcgcgtctacggccatcgcaaagggtaaaccatgctgaaaactatccgaaaacacggcattacgttggcgctatttgcagcgggtagtacagggttaactgcggccatcaaccagatgaccaaaacgacgattgctgaacaggccagtctgcaacaaaaggcgttatttgatcaggtgctgccagccgaacgctataacaatgcgctggcacagagttgctatctggtaactgcgccagagttaggtaaaggtgagcatcgggtttacatcgccaaacaggatgacaaaccggtagccgccgttctggaagcaaccgcgccagatggctattccggtgcgattcagctgctggtgggagccgattttaacggcacggtacttggcacgcgcgtgacagagcaccacgaaacgccagggcttggcgataaaatcgaactgcgcctttctgactggatcacccattttgcgggtaaaaaaatcagtggtgcagatgatgcgcactgggcggtgaagaaagatggtggtgatttcgaccagttcaccggcgcgacgattactccccgcgcggtggttaatgcggtaaaacgcgccggattgtacgctcagacgttaccggcacaactttctcaacttcctgcctgtggagaataaagcgtgagcgaaattaaagacgttattgttcaggggttgtggaaaaacaactctgcgctggtccagttgctcggcctttgtcctctgttggcggtcacgtccactgccactaacgctctgggtttaggacttgcgactacgctggtactgacgctgaccaacctgaccattagcacgctgcgtcactggacgccagccgagatccgcattcccatttacgtgatgatcatcgccagcgtggtcagcgctgtacagatgctgatcaacgcctacgcctttggcctgtatcaaagtttagggatttttattccgctgattgtcactaactgtatcgttgtgggccgcgctgaagccttcgccgccaaaaaaggtccggcgcttagcgcactggacggctttagtattggtatgggcgcaacctgcgccatgttcgtgctgggtagtctacgcgaaattatcggcaatggcacattgtttgacggtgcagatgcgctgttaggtagctgggcaaaagtattacgcgtggagattttccacaccgactcccctttcctgctggcgatgctgccaccaggtgcatttattggcctgggactgatgctggcaggaaaatacctgattgatgaaagaatgaaaaagcgccgtgctgaagcagctgcagaacgtgcattgccaaacggtgaaacagggaatgtctgatgaataaagcaaaacgcctggagatcctcactcgcctgcgtgagaacaatcctcatcccaccaccgagcttaatttcagtagcccttttgaattgctgattgccgtactgctttccgctcaggcgaccgatgtcagtgttaataaggcgacggcgaaactctacccggtggcgaatacgcctgcagcgatgcttgaactgggcgttgaaggggtgaaaacctatatcaaaacgattgggctttataacagcaaagcagaaaatatcatcaaaacctgccgtatcttgctggagcagcataatggcgaggttccggaagatcgtgctgcgcttgaagccctgcccggcgtaggtcgtaaaacagccaacgtcgtattaaacactgcattcggctggccgactattgctgtcgacacgcacattttccgcgtttgtaatcgtactcaatttgcgccggggaaaaacgtcgaacaggtagaagaaaagctactgaaagtggttccagcagagtttaaagtcgactgccaccattggttgatcctgcacgggcgttatacctgcattgcccgcaagccccgctgtggctcttgtattattgaagatctttgtgaatacaaagagaaagttgacatctgaagaaaaggggtaacaccgattaccccattgataacctttctttatcctcttttaaaacatctttttaacgtcaatgatgccattgcttagcgttatcatcaggtaatccgtttgcggataaccaaaaatgcaggttaattgtttttttaatagcgaaattttctattcattcgtgatcaagatcacgatgctgtcgcaatgtaaaaacattgcaagaatcaggttaaaatcatttaaatttacacacgcaacaaatattgacctacaaaacattacactggctatttttcagaaactggactatctcactagtaaaaacgctaaatagcagaacatatcgccgttaagccatcacccccctctcagtgcagtgaaaaaatctgccgttacgttttttgaaaaatttaacgctggataacatttcccggaatggttgaattccccgcctcagttatatgtaacagattattacaaaggacttgtctgaaagtgcaagatagtgaacattacctgccgtttcccctcccactataacaattgcgcgtatgttttttatacataacgcgagaaagcacccccgttaatatgggatgtaaaaaaagaggtaaaagtgtccactgcaaaccaaaaaccaactgaaagcgtcagtttgaacgctttcaaacaaccgaaggcgttctatctcatcttcagcattgagttatgggaacgttttggttattacggcctacaaggaattatggctgtttacctggttaaacaactgggtatgtctgaagcggatagtatcacccttttctcttcctttagtgccctggtttatggtctggtcgctatcggcggctggttaggtgacaaggtactgggtactaaacgcgtaattatgctcggcgctattgtgctggcgattggttatgctctggttgcctggtctggtcacgacgccggtatcgtttatatgggtatggcggctattgcggtcggtaacggcctgtttaaagctaacccgtcttctctgctttctacatgctatgagaaaaacgacccgcgtctggacggtgcattcaccatgtactacatgtccgtcaacatcggctctttcttctctatgattgctacgccgtggctggccgcgaaatacggctggagtgttgcgtttgcgttgagcgttgtaggcctgctgatcactatcgttaacttcgccttctgccaacgctgggttaaacagtacggtagtaaaccagacttcgagcctatcaactaccgtaacctgctgctgaccattattggtgttgtggcactgatcgctatcgccacctggctgctgcacaatcaggaagttgcgcgtatggcgctgggcgttgttgccttcggtatcgtggttatcttcggtaaagaagccttcgcgatgaaaggtgctgcgcgtcgtaaaatgatcgttgccttcatcctgatgctcgaagccattatcttcttcgtgctgtacagccagatgccaacgagtctgaacttctttgcgattcgtaacgttgagcactccattctgggtctggccgtagaacctgagcagtatcaggcactgaacccgttctggatcatcatcggtagtccgattctggccgctatctataacaagatgggcgataccctgccgatgccaaccaagtttgcaatcggcatggtgatgtgttctggtgcgttcctgattctgccgctgggtgcgaaattcgcgtctgacgctggtatcgtgtctgtaagctggctggtcgcaagctatggcctgcagagcatcggggaactgatgatctctggtctgggtctggcaatggttgctcaactcgttccgcagcgtctgatgggcttcattatgggtagctggttcctgaccactgccggtgcaaacctgattggtggttatgttgcgggtatgatggctgtgccggataacgttaccgatccgctgatgagtctggaagtctatggtcgcgtattcttgcagattggtgtcgctactgccgttattgcagtactgatgctgctgaccgcgccgaaactgcaccgcatgacgcaggatgacgctgcagacaaagcggcgaaagcagccgtagcgtaaaattcagggaaactcttttacaagccgctaacttttcgttagcggctttttttttgttcagcaacgcactaccatactttaaaccacagacaaaaggagttaccgatgaaattgttctacaaaccgggtgcctgctctctcgcttcccatatcaccctgcgtgagagcggaaaggattttaccctcgtcagtgtggatttaatgaaaaaacgtctcgaaaacggtgacgattactttgccgttaaccctaaggggcaggtgcctgcattgctgctggatgacggtactttgctgacggaaggcgtagcgattatgcagtatcttgccgacagcgtccccgaccgccagttgctggcaccggtaaacagtatttcccgctataaaaccatcgaatggctgaattacatcgccaccgagctgcataaaggtttcacacctctgtttcgccctgatacaccggaagagtacaaaccgacagttcgcgcgcagctggagaagaagctgcaatatgtgaacgaggcactgaaggatgagcactggatctgcgggcaaagatttacaattgctgatgcctatctgtttacggttctgcgctgggcatacgcggtgaaactgaatctggaagggttagagcacattgcagcatttatgcaacgtatggctgaacgtccggaagtacaagacgcgctgagtgcggaaggcttaaagtaatagccatcggcccacaggtcgttgtgggccgaaatgagatatttcagagctttgttgcgctgaagtaatgttctggtttggcaatacgatcctgagcagccaccacttgcagctcatattcctgcattgctttggtggtcaccatgatttcgtagactgcagcggtcacatgttccagcgcctcctgcagcgttgccccctgaagcagtttcaccagcagtaaaccgctcgtcacatcaccaacacctaccggctggcgcataccaaaatccaccagcggacggctgatatgccaggcttcatcggcggtgaccagcagcatttcaaaacggtcacggctgtagccagctcgcgccaggtgtttaaccaacacaatttgtggcccttgcgcaatgagttcgcgcgctgccagaaccgcttcttcgacgttatttaccgcatgctcacagagtatttccagctcaaccagatttggcgcaatgatatcgctggcaggcaaaccgtgccgcacatgaaactctgcgacacccggtgcaacgatacagcctttttccggatgacccattaccggatcgcaaaaatatttcgcctgcggattcgcggctttcacctgacggacgataccgaggatatgttcaccctgctccgcgcttcccagatagccacttaatacggcatcacaggtgtgtaatttatcaatggcggcaatgccttgcacaatttcggttaaatggctgggcggcatcacgcagccagtccatttgccgtattgggtgtgattagaaaattgaacggtgttcagcggccagacgttcgcgcccaggcggcgcatcggaaactctgccgcactgttacccgcatgaccataaacaacgtgagactggatagcgagaatatttttcatcatgttccctgtataaaaaccagggggagtgatttctcactccccctttccacttaatgcattatttccagcaaatcagacagtaattctttttaccgcgacgcagtaaggtaaaacgaccaaacagacgatcttcttctttaaagaagtattcaggatcggactgtttttcaccgttaatggtgatggcattggaggcgatagttttacgtgcctgaccacgggaaggttgcagttcagaatcgaccagtgcctgcatcaggtctgcgcccttttccatctcaaccatcggtacgccgtcctgcgccagctgttcgaagtccgcttcactcagcgcactcaaagaaccgctgaacaggcattcggtaatacgttttgccgcctgtaaaccttcttcaccgtgaaccagacgagtcacctgctccgccagtacatactgggcgcgcggtgctttaccgctgtttttatcttcttcttccagggcgttgatctcttcaatgctcataaaggtgaagaacttcaggaagcggtaaacgtcggcatccgcagtgttgatccagaactggtagaatttgtacgggctggttttcttcggatccaaccagactgcgccgccttcagttttaccaaatttggtgccatctgctttagtgatcagcggaacggtcaggccaaacacctgattctgatgcagacgacgggtcaggtcgataccagaagtgatgttaccccactggtcagaaccaccaatttgcagcaccacaccgtactgtttgttcagacaggcgaagtcataaccctgcaacaggttgtaggaaaactcagtgaagctaatcccctgatcttcacggttgagacgctgcttaaccgcttctttgttgatcatctggttaacggagaagtgtttgccaatatcgcgcaggaaggtcagcacattcatattgccgaaccagtcatagttgttcgccgcgatagcagagttttctccacagtcgaaatcgaggaacggggcaacctgcttacggattttgtccacccactcctgaacagtttcttcggtgttcagcttacgctcggcagctttgaagctcgggtcgccaatcagacccgtcgcgccgcctaccagcgcaaccggcttgtggcccgcctgctggaagcgtttcaggcataacaatggaacaagatgccccaaatgcaagctgtcagcggtaggatcgaagccgcaatagagcgcgatcgggccttgcgccagtcgctctgctaacgcttcctcgtccgtcacctgggctaccagcccccgctcttgcaattgtttaatcaagttactgcttgccatcaaaatctccatgtatataacgactgcacctttgccggtacacgacttttcgccagatgcgaaagagacatagaataaagtgccagaatcaggagtaccagcgattaaagcaagatttttgcatcttttcagggtgcaagacgatcaatcttccacgcatcattttcacgctggtacaaaaagcggtcatgcaggcgatgctcaccaccctgccagaactcaatctgttcaaggctgacgcgaaaaccgccccaaaagctcggcaatggcacttcgccctgttgaaacttctgcttcagctccaggaatttactttcaaggataccgcgggcagaaatgcgactggactgcttgctaacccatgcaccaatctggctatcacgcgggcggctatgaaaatatttcatcacttcgagagtgctaagtcgttctgctttaccgatcaccatcacctggcgctcaagggtatgccacgggaacagcaggctaacgcgcggattattttcgatttgatgtgctttacggctgccgaggttggtgtaaaacaccatgcctttttcgtcgtaatgtttgagtaaaacgatgcgctgataaggctgaccatgttcatccacggtagcgaccaccatcgcggtagggtccgccagtttggcttcacaagcctgagagagccaacgttcaaaaagggttaatggatcggcgggaagatcgcggcggcgtaacccgcctttggtgtattcacggcgcagatgcgcgatttgctgcaattcgtcgttatcagacatggttttctttacggattgtcagtgggtgacgctattgtgcgccgcccctggaaaaatctcaacgctgtggattttgtaactgacagttattcaagacgatgcggtcgcgtttatagacagtcgcttcatcgcctttgctccagaaaacatagattccgtcagtgtaacgcgcgccagaggcactaatgccctgtttgagatgcagtagttgattatcgtaaacaaaactgacctcctggcgcggattattcagtttgaccgtcaacggtttttcatcacactggtattccagcgtatcggtttgcatgcgctcaaccagctgattaaaggcgctacagccggagagaaggaccggcaaaatgataattaacagttttttcatagtcatatcccgaagactttcctggtctggagggcaatacgccctccctaacgttccaagtgtaacggcagacgcggtaagaaaaattcagttaactctgatatcacgggttagcggggaaaatagcccccagtaccgtctcctggcttgcgccagtgacggaaggcagatttcctggtaatcccgccagcgtccgccaggcaagccaggcgaaagccaatgcttccatgtcatcgccactaatgccaacggcatcggtggtggtgacttctgtgcctggcagtaatgccgccagacgcgccatgagtagcggattacgactacctccaccacataccatcaatcgttcgcagccaccgctcaacaaaacttgttcagaaatggtcacggcggtgagttctgccagtgtcgcctgcacatctcggggatcaacacccggaaaatggcgcaaatggcgctccagccaaccatagttaaagtattcgcgtccggtgcttttcggtgcaggttggctgaaatacgggtcgctgagcatattttgcagcagtgggagaataactttacccgcccgtgcccactcggcatctttatcgtaaggtttaccggcctgacgccagatccaggcatccatcagcatgttaccaggaccggtatcgtagcccccaaccggctgcccaggaatgagcagactcagattggcgatgccgccaatattgagcaccattcgtcgctcggttgggtgagccagcagcgcatgatggaacgcaggtaccagcggtgcgccttgtcctcccaaggcaatatcgcgacggcgaaaatcaccgacaaccgtaattccggtgcgtgccacaatttgattgttatcgccaatctgtaaagtgtgtggtgccacgcccgtcggttcatgccagacggtttgaccgtgacaaccgatcgcaactatatctcttgcctgcagattttgttccttaagcaaggcattgaccgcatcagcaaaaagttgcccgagttgagtatcaagctgtccaaactggctaagtgtaagctgctggccctggcaaatatccagtacagcctgtttcagagataccgggatcggccaactcaaacttgccagctgtgcgacccggtgttcatcaattgtcgccaacacaacatcaacaccatcaaggctggtgccactcataacgccaataaagcggccgcttttcatagttcatcctttttcaatctgacgtttgcgcaccactcaaacataaacttttcgtgaataccatgcggaatgaccgatttttaccgttggtagtaaaacattatcttcaaatcaataatcatcatgaatgttttgtttataattggttgatcctactttcattatgatttgctcatatttggtagaacatgtaaccatggattcacatatgccatatactttgaccatgagggatgcttgcgtggcgtttcatggtgaacaggagatttttcaatgattaaacgcgtattggttgttagtatggtaggtctgtctcttgtcggttgtgttaataacgacaccctgagtggggatgtttataccgcttctgaagcgaaacaagtacagaatgtcagctatggcaccatcgttaacgtacgtccggtacagattcagggcggtgatgattccaacgttatcggtgcaattggcggtgctgttcttggtggtttcctggggaatactgttggtggcggaaccgggcgttctctggctactgcagcaggcgctgttgcaggtggcgtagctggtcagggcgtacagagtgcaatgaacaaaacgcagggtgtcgagctggaaattcgtaaagacgatggtaataccatcatggtggtacagaaacaaggcaacactcgtttctctccgggccaacgtgtcgtactggccagcaatggcagtcaggtgaccgtttctccgcgctaaataagtttgcgtgtggtcaggttactgaccacacgcccccttcatttcaccctttggcctgtaactcaatgatattatgctcaagttttgcgatgagcgtaatcagttgctccagttcctctgcggagatgccatgtaatatttccgcgcgggttttgttaataacagcttccatttcgctgatcagcggctctgccttttccgtcagtttaatacgtttagcccgacgatcgctggcacaagtttgacggctaattaaccctttttcttccagttggtccagagtacggaccagacttggctgctcgatgccaatcgcttttgccagttgaatttggctctggtctggaggtaactgatggatattgtgtaacgtaacccaatgggtttgtgttaactccagcggtttcaggcgatggtctatcagagcacgccatatgcgcaccaaccgtgccagatcagaacctagtgggctttccaatttcatctccttataattagcttgctaagatattatgcggcttttagaatagtgtgcagcaattgtattgctaaaacaaatgtattgctgcatttggttaccgtcagacatatttttcagaaattgcgcgtaaatttttcgcacttaaagaatatttattaatctaacgcaatatattcggtcgtaaaggaatctactttgtgaagtttatgctcaatgcaacaggattgcccttacaagatctggtgttcggtgcgtccgtctactttcctccgtttttcaaagcattcgcgtttggattcgtcatctggcttgtcgtacaccgcctgcttcgtggctggatctacgccggtgacatctggcatcccttgttaatggatttaagcctgtttgcgatttgcgtttgccttgctctggcaatactgattgcgtggtaactatgagtattaaaacaattaagtatttcagtacaatcattgtagcggtagttgcggttcttgccggatggtggctgtggaattattacatgcaatctccgtggacacgcgacgggaaaatacgcgcagaacaggtttctatcaccccacaggtgagcggacgtattgttgagctgaatataaaagacaaccagctggttaacgcgggggatcttctgctcacgatcgataaaacgccctttcagatcgccgagctgaacgcacaggctcagctggcgaaagcgcaatctgacctcgcaaaagccaataacgaagcgaatcgtcgtcgtcatctcagtcaaaattttatttctgccgaagaactcgataccgctaacctcaatgttaaagcgatgcaggccagtgttgatgccgcacaggcgacgctgaaacaggcacaatggcaactggcgcaaacggaaattcgcgccccggtgagtggatgggtgactaaccttactacccgcatcggcgattacgctgataccgggaaaccgctgtttgcccttgtcgacagccacagcttttacgtcattggttattttgaagaaaccaagttgcgccatatccgcgaaggtgcaccagcacaaattaccctctatagtgataacaaaacgttacagggtcacgtttccagtatcggtcgggcgatttatgatcagagcgttgaaagtgacagtagccttattccggatgttaaacctaacgtcccctgggttcgactcgcccaacgcgttcccgtccgctttgcgctggataaagtcccaggcgatgtcacgttggtgagcggcaccacctgtagcattgccgtaggtcaataatgaacgcaagcagttggtccttgcgcaatttgccctggttcagggccacgctggcgcaatggcgttatgcgttacgcaataccattgccatgtgtctggcgctgacggttgcctattatttaaatctggatgaaccctattgggcgatgaccagcgctgcagtggttagctttcccaccgttggcggtgttatcagcaaaagcctcggacgcatcgctggcagtttgctcggagccattgcggcactgcttcttgccgggcatacgctcaatgagccgtggttttttctattgagcatgagcgcgtggcttggcttttgtacctgggcctgtgcgcacttcacgaataacgtcgcgtatgcatttcaactggcgggctacacggctgccatcatcgcctttccgatggttaatattactgaggccagccagctgtgggatatcgctcaggcgcgcgtttgcgaggtaatagtcggtattttgtgcggcggcatgatgatgatgatcctgccgagcagttccgatgctactgcccttttaaccgcattgaaaaacatgcacgcccgattactggaacatgccagtttactctggcagcctgaaacaaccgatgccattcgtgcagcacatgaaggggtgattgggcagatactgaccatgaatttgctgcgtatccaggctttctggagccactatcgttttcgccagcaaaacgcgcgccttaatgcgctgctccaccagcaattacgtatgaccagtgtcatctccagcctgcgacgtatgttgctcaactggcccagtccgccaggtgccacacgagaaattctcgaacagttgctgacggcgctcgccagtagccaaacagatgtttacaccgtcgcacgtattatcgccccgctacgcccgaccaacgtcgccgactatcggcacgtcgccttctggcagcgactacgttatttttgccgcctttatctgcaaagtagtcaggaattacatcgtctgcaaagcggtgtagatgatcataccagactcccacggacatccggcctggctcgtcataccgataacgccgaagctatgtggagcgggctgcgtacattttgtacgttgatgatgattggcgcatggagtattgctagccaatgggatgccggtgccaatgcattaacgctggcagcaattagctgcgtactctactccgccgtcgcagcaccgtttaagagcttgagtcttctgatgcgcacgctggtgttacttagcctattcagctttgtggtcaaatttggtctgatggtccagattagcgatctgtggcaatttttactgtttctctttccactgctggcgacaatgcagcttcttaaattgcagatgccaaaatttgccgcattgtgggggcaactgattgtttttatgggttcttttatcgctgtcactaatcccccggtgtatgattttgctgattttcttaacgataatctggcaaaaatcgttggcgtcgcgttggcgtggttagcgttcgccattctgcgtccaggaagcgatgctcgtaaaagccgccgccatattcgcgcgctgcgccgggattttgtcgatcagctaagccgccatccaacactgagtgaaagcgaatttgaaagcctcacttatcatcacgtcagtcagttgagtaacagccaggatgcgctggctcgccgttggttattacgctggggtgtagtgctgctgaactgttctcatgttgtctggcaattgcgcgactgggaaagccgttccgatccgttaagccgagtacgggataactgtattagtctgttgcggggagtgatgagtgagcgtggcgttcagcaaaaaagtctggcggccacacttgaagaattacagcggatttgcgacagccttgcccgtcatcatcaacctgccgcccgtgagctggcggcaattgtctggcggctgtactgcagccttagccaacttgagcaagcaccaccgcaaggtacgctggcctcttaattacttaattacaccacaggcatagcgttcaccgccaccgcccagcggtttaggttgatcggacatattatcgccgccaacgtggaccatcagcgctttgtctttgatttcatccagacttttcagacgaggcgcgatgacggcatcggtagctttgccgtcattattgacgaccagtgcaggcagatcgcctaaatgcccggcaccttctggcccttcatgtttaccggtattttgtggatcaagatgcccgcctgcggattccgcggcgctggctttgccatctttggtggctggctggcagcttcctttggcatgaatatggaagccatgttcaccggggggtaatgctttcagatcggggctaaactccagacctttatcggtttcagtaatggtgacgctaccaatactctgccctaccccttggctcgtgacgaggttcatctcgactttttcactggcagcttgtgcgccggttgcaacaaccagcgccagaatagccagactaaaacgtttcataggacctccgttcattgtgcattcctgaataagtgtaaaccagtgacacatttttgaacggcggctattcctaaaagtgcttacggtacgtcgtaccccagtgccgctttacggatacgaaaccattgttgacgggtcattttcagtgtttctgcttcgacagctgcccgtacgcgctcaattttaccactaccgataattggcagcggctggcttggtaaacgtaatacccaggcgtaaaccacctgttcaatgctgcccgcgtttaactcctctgccaccacagccagttcatcacgcagcggctggaaataatcatcattaaacagacgaccaccaccaaggcaggaccacgccatcggacgaacacgcagttgttgtagttggtcgagcgtgccatccagcagtaacggctgatgcaccggggatatttccacctgattagtggcaagggtaaacggcagacgactttgcaacagggcaaattgcgcaggcgtaaagttgcttacgccaaaatgacgcactttgccgctctgatgcagatgtttgaacgcgtccgccacttcatcggcatccattaacgggtctggtcggtggattaacagcaaatccagatgatcggtcgcgagattaattaggctctgttcggcgctcttaatgatgtgatcgcggtcagtgatgtaatgaccaatgacgttttcttcacgcgcggtcgtcgcgataccgcatttactgacgatttccatccgttcacgcaggtgaggtgccagtttcagtgcctcgccaaacgccgcttcgcactgatagccaccataaatatcagcatggtccacggtggtcacgccgagatccagatgctcttcaataaaactgaccagctggcgggcggacatattccagtccatcaatcgccagtagcccatcacaaaacgggaaaactccgggccttgcggcgcaatagtaatacgctgaaccataatcgcttcctcttatcagatatgagaggagtatacgcaagattaggttcaaaagagacttggttgctccggttcgtcactactcgctggcttatttgcgcgtaatttgcgcattaatcgctgccgacaaaggcgcagcacctcttgtttttcgccatcgctcattttattccagttaaaacgctcatcacgactacgaaaacagccgcgacaaaacccgcgttcgtcagactggcaaattccccggcacgggctctggacgggaaagaactctaattgctccgccacttcgccctcctcagataagattattaccattattgaagctgttaatgtccaaagtagcaactttgcttgcactagaccgactggtctactacactccaacgcatgaacaaacacaccgaacatgatactcgcgaacatctcctggcgacgggcgagcaactttgcctgcaacgtggattcaccgggatggggctaagcgaattactaaaaaccgctgaagtgccgaaagggtccttctatcactactttcgctctaaagaagcgtttggcgttgccatgcttgagcgtcattacgccgcatatcaccagcgactgactgagttgctgcaatccggcgaaggtaactaccgcgaccgcatactggcttattaccagcaaacactgaaccagttttgccaacatggaaccatcagtggttgcctgacagtaaaactctctgccgaagtgtgcgatctgagtgaagatatgcgcagcgcgatggataaaggtgctcgcggcgtgatcgccctgctctctcaggcgctggaaaatggccgtgagaaccattgtttaaccttttgtggcgaaccgctgcaacaggcacaagtgctttacgcactgtggcttggcgcgaatctgcaggccaaaattagccgcagtttcgagccactggaaaacgcgctggcccatgtaaaaaacattattgcgacgcctgccgtttaacaggcattttttatcaccagacgaccgggagcctttatgagttctgaaaaactgtattccccactgaaagtgggcgcgatcacggcggcaaaccgtatttttatggcaccgctgacgcgtctgcgcagtattgaaccgggtgacattcctaccccgttgatggcggaatactatcgccaacgtgccagtgccggtttgattattagtgaagccacgcaaatttctgcccaggcaaaaggatatgcaggtgcgcctggcatccatagtccggagcaaattgccgcatggaaaaaaatcaccgctggcgttcatgctgaaaatggtcatatggccgtgcagctgtggcacaccggacgcatttctcacgccagcctgcaacctggcggtcaggcaccggtagcgcctagtgcacttagcgcgggaacacgtacttctctgcgcgatgaaaatggtcaggcgatccgtgttgaaacatccatgccgcgtgcgcttgaactggaagagattccaggtatcgtcaatgatttccgtcaggccattgctaacgcgcgtgaagccggttttgatctggtagagctccactctgctcacggttatttgctgcatcagttcctttctccttctagtaaccatcgtaccgatcagtacggcggcagcgtggaaaatcgcgcacgtttggtactggaagtggtcgatgccgggattgaagaatggggtgccgatcgcattggcattcgcgttagtccaatcggtactttccagaacacagataacggcccgaatgaagaagccgatgcactgtatctgattgaacaactgggtaaacgcggcattgcttatctgcatatgagtgaaccagattgggcggggggtgaaccgtatactgatgcgttccgcgaaaaagtacgcgcccgtttccacggtccgattatcggcgcaggtgcatacacagtagaaaaagctgaaacgctgatcggcaaagggttaattgatgcggtggcatttggtcgtgactggattgcgaacccggatctggtcgcccgcttgcagcgcaaagctgagcttaacccacagcgtgccgaaagtttctacggtggcggcgcggaaggctataccgattacccgacgttgtaatccaacattgcgagcggcgtaaagccgccgctatactaaaacaacattttgaatctgttagccattttgaggataaaaagatgcgtcttcttcataccatgctgcgcgttggcgatttgcaacgctccatcgatttttataccaaagtgctgggcatgaaactgctgcgtaccagcgaaaacccggaatacaaatacagtctggcgtttgttggctacggcccggaaaccgaagaagcggtgattgaactgacctacaactggggcgtggataaatacgaactcggcactgcttatggtcacatcgcgcttagcgtagataacgccgctgaagcgtgcgaaaaaatccgtcaaaacgggggtaacgtgacccgtgaagcgggtccggtaaaaggcggtactacggttatcgcgtttgtggaagatccggacggttacaaaattgagttaatcgaagagaaagacgccggtcgcggtctgggcaactaatctcctgccgggcgtgaactcatcgcgcccgcatctttactgcatcgacaagtaatatttgtcataatgcgcgctgcaatttatccgtattaagagaatcagatgtccgataacgctcaacttaccggtctgtgcgaccgttttcgtggtttttatcctgttgtgatcgatgttgaaacagccggatttaacgccaaaaccgatgcgctgcttgagattgccgccatcaccctgaaaatggatgaacaaggctggctgatgccggacaccacattacatttccacgtcgaaccatttgtcggcgcaaatttgcaaccagaagccctcgccttcaacggcattgacccgaacgatcccgatcgcggcgcggtcagcgaatacgaggcgctgcacgaaatttttaaagttgtacgtaaaggtattaaagcgagcggctgtaaccgcgccattatggtggcgcacaatgccaattttgatcacagctttatgatggccgccgcagaacgcgccagtctgaaacgtaacccgttccaccctttcgccacttttgacactgctgcactggccgggctggcactcggacaaaccgtattgagtaaggcttgccagaccgctggcatggacttcgacagcacccaggcgcactccgcgctgtacgacaccgaacgcactgctgtgctgttttgtgaaatcgtcaaccgctggaaacgtctgggaggctggccgctatctgccgccgaagaggtgtaatcgagtcgatgcctgatgacatgcaatgattcaggcatctatagtgaggctattccacgcatcctgcatgatattcacggggaatagcgttaatggcagataatccagaccctagtagcctcctgccggacgtgtttagtccggcgacccgcgactggtttcttcgcgcctttaaacagccgaccgctgtccagccgcaaacctggcatgtggcggcgcgaagcgaacatgcgctggtgattgcaccgaccggctccgggaaaacgctggcagcatttctctacgccctcgatcggctcttccgcgaaggcggcgaagatacccgcgaggcgcataagcgtaaaaccagtcgcatcctctatattagtccgataaaagccctgggcaccgacgttcagcgcaacttgcagatcccgttgaagggtattgccgatgaacggcggcggcgcggcgaaacggaagtcaatcttcgcgtagggatccgtactggcgatacgcctgcacaggaacgcagcaaactcacccgtaatccgccggatattctgatcaccacacccgaaagtctctatctgatgctgacctcccgcgcgcgcgaaacgctacgcggcgtcgaaacggtaattattgatgaagtccacgcggtagcgggcagtaaacgtggtgcgcatctggcgttaagtctggagcggctcgatgcgctgctccacaccagtgcacagcgaattggcctttctgccactgtgcgcagtgccagcgatgtggcagcatttcttggtggcgatcgcccggttacggtagtcaacccgcccgcaatgcgccatccgcagatacgaattgtcgtaccggtcgccaatatggatgatgtcagtagcgtcgccagcggcaccggcgaagacagccatgccggccgggaaggctccatctggccatatattgaaacgggtatccttgatgaagtgttgcgccatcgcagcaccattgtctttactaatagccgggggctggcggaaaaactgacggcacgattaaatgagctttacgccgcacgcttacagcgttccccgtctatcgccgttgatgcggcccatttcgagagcacctccggcgcaacctctaaccgtgtacaaagtagcgacgtttttattgcccgcagtcaccacggctccgtctctaaagaacaacgagcaatcaccgaacaggcgctgaaaagcggtgaattacgctgcgtggtcgcaacctccagtcttgaactggggattgatatgggcgcggtggatctggtgattcaggtggcaacgccgctttctgttgccagtgggttacaacgcattggtcgcgccggacatcaggttggcggtgtatctaaagggctgtttttcccccgtacccggcgtgatttagtcgattccgcagtcattgtagagtgtatgttcgcaggcaggctggaaaacctgacaccaccgcataatcctctcgacgtccttgcgcagcaaaccgttgccgccgcggcgatggatgcattacaggtagacgaatggtactcccgcgtacgccgtgccgcaccgtggaaagatctgccaagacgtgtttttgacgccacgctggatatgctttccgggcgctatccctctggcgatttttctgcttttcgccccaaactggtctggaacagggagaccgggatattgaccgcccgacctggcgctcaattgttggcggttaccagcggcggcaccattccggatcgtggcatgtatagcgtgttattacccgaaggtgaagaaaaggccggtagccggcgggtgggtgaactggatgaggagatggtatatgagagccgggtgaacgacattatcactctcggcgctaccagttggcggatccagcaaatcacccgcgatcaggtgattgtgactcctgctccgggtcgttctgcccggctccccttctggcgtggtgaaggtaacggacgtccggctgaattaggcgagatgatcggcgattttcttcatttgctggcggatggcgcgttcttttccgggactattcccccgtggctggcagaagaaaatacgatcgccaatattcaggggttgattgaggagcagcgcaacgcgacgggcatcgttccggggagtcgccatctggtcctcgaacggtgccgtgatgaaattggtgactggcgtattattttgcactctccctatggaagacgggtgcatgaaccctgggcggtggcgattgccgggcgaatacatgcgctatggggcgctgacgcgagcgtggtcgccagtgatgacggcattgttgcacgtattcctgacaccgatggtaaattgcccgatgccgcgatttttttgtttgaaccagaaaagttgctgcaaattgtccgcgaggcggtaggcagcagcgcacttttcgccgcccgttttcgcgaatgcgccgcgcgggcattattaatgccggggcgcactccgggccatcgcaccccgctttggcaacaacggctgcgcgccagtcagttgctggaaatcgctcagggatatccggattttccggtcattctcgaaaccctacgcgaatgtctgcaagatgtttatgatcttcccgcactggaacgtttgatgcgtcgcctgaacggtggcgaaattcaaatatccgatgtaacgaccactacgcccagccctttcgccacaagtttattgttcggctatgtcgcggaatttatgtaccagagcgacgccccgctggcagagcgccgggcatccgtactgagcctggacagcgagttactgcgcaatctactcggacaggtcgatccgggggaattactcgacccgcaggtcattcgccaggtggaagaagagttgcaacgactggctcctggcagaagagcgaaaggtgaagaaggattgttcgacctgctgcgcgaactggggccaatgaccgttgaagacctggcgcaacggcatacaggcagcagtgaagaggttgcgagctatctggaaaatcttcttgcagtaaaacgaatcttcccagcgatgattagcggacaggagcgtcttgcctgtatggatgatgccgccaggctgcgtgatgccctcggcgtacgactaccagagagtttgccagagatttatttacatagagtcagttacccgcttcgcgacctctttctgcgctatctccgggctcatgctctggtcacggctgaacaactggctcatgagtttagtctcggtattgccattgtcgaagagcagcttcagcaactgcgtgaacagggtctggtgatgaatctgcaacaagacatctgggtgagcgatgaagtatttcgtcgtctgcgtttgcgcagcctgcaagccgccagagaagcgacgcgtcccgttgcagccacgacctatgcgcgattgctgctggaacgtcagggcgtattacccgccaccgatggtagcccggcgctctttgccagtacaagcccaggcgtttatgagggcgtagatggcgtgatgcgggtgatcgaacagcttgccggagtcggtttacccgccagtctctgggaaagccagatcctgcctgcccgcgtacgcgactatagcagtgaaatgctcgatgaattactggcaaccggtgcggttatctggagcgggcaaaaaaaactgggtgaagatgacggcctggtggcactgcatctacaggaatatgctgcagaaagcttcactcccgccgaagcggatcaggcgaatcgtagcgcgctgcaacaagcgatagtcgctgttctggctgacggaggagcctggtttgcacaacaaatcagccaacggatacgcgacaaaatcggcgaaagcgttgatctctctgccctgcaagaggcgttatgggcgctggtctggcaaggcgtcatcaccagcgacatttgggcaccgttacgcgccctcacccgcagcagttccaacgcacgcaccagtactcgccgcagtcaccgggctcgtcgtggacgtcctgtctatgcgcaacccgtcagcccgcgggtatcttacaacacaccaaatctggctggacgctggagcttattgcaggtggagccactaaacgataccgaaaggatgctggcgctggcggaaaatatgctcgaccgctacggcatcatcagtcgtcaggcggtgatagccgaaaatatccctggcgggtttccaagcatgcaaacgctttgtcgaagtatggaagactccgggcgaattatgcgaggtcgttttgtagaaggtctgggtggcgcgcaattcgctgaacgtctgactattgaccgattgcgcgatctggcgacacaagccacgcaaacgcgccactatacaccagtggcgctctctgccaacgatccggctaatgtgtggggaaatcttctgccctggcctgcacatccggcaacgctggttccaacgcgtcgggcgggtgcgctggtggtcgtttctggcggcaaattgttactctatctggcgcaaggtggcaaaaaaatgctggtctggcaggaaaaagaggaattactcgccccagaggttttccacgcgctgactaccgcactgcgtcgcgaaccacggctgcgctttacgctaacagaagtgaatgatctaccggtccggcaaacgccgatgtttacgctgctgcgtgaggcgggatttagtagtagcccacaagggctggattggggataaagaaaggactgacggatgcccgttcgcatccgtcagtattgcaggacggattattccgcgtccggctcttcagacttgtatttagcggcagtttctttgatcagctgctgcagttcgccacgctgatacatttcgatcacgatatcacaaccgccgaccagctcgccgtcaacccacagttgcgggaaggtcggccagttagcatatttcggcagttccgcacgaatgtccggattctgcagaatatcaacataggcaaaacgttcgccacatgcggcaagcgcctggactgcctgggcagagaaaccgcagctcggcagtttcggactacctttcatgtacagcaggatcgggttttcagcaatctggcgttggattttttcgatagtggtgctcattgtcttgcttcctcaaacttctttacggcagtaatctgacattgtagcgggtcagtgcggcatcggaaaataacattttcatcacgcttttgctattttatccctttgctctatttgttgcatttcaaatattcgtttcttctctgatgccggcaaactggcgtatttataaccatttttagctttcactgctgcatttttttgcgctcgccaacgaaacgtattttttaacaataaaagctattaactttctcttcttctatgcattagaatcatcaagttttgtaaatcagacgcaggcatgatagacctgcctttacagagggacgctcagtggcgcggataaaccgtattagcatcacgctctgtgctttactttttaccaccctgcctttaacgcctatggcccatgctagtaagcaagccagggagagttctgctaccactcatatcaccaaaaaagcagataaaaagaaaagcacggcaaccaccaaaaagacccagaaaacagcgaaaaaagccgccagtaaaagtacgaccaaaagcaaaaccgcttcttccgttaaaaaatcttccattaccgcttctaaaaacgccaaaactcgcagcaaacacgccgtcaataaaacggccagtgccagctttaccgaaaagtgtaccaaacgtaagggctataaaagccattgtgtgaaagtcaaaaatgccgcgagtggaactcttgccgacgcgcacaaagcgaaggtgcaaaaagctacgaaagtggcaatgaataaactgatgcagcaaattggtaagccatatcgttggggtggcagcagtccgcgtaccggttttgattgcagcggcctggtttattacgcttataaagatttggtgaaaattcgtattccgcgtacggcgaatgaaatgtatcacctgcgtgatgcagcgccaatcgaacgtagtgaactgaaaaacggcgacctggtctttttccgtactcagggacgcggcacagccgatcatgtcggcgtgtatgtcggcaacggcaaatttattcagagtccgcgcacaggtcaggaaattcaaatcacttctctcagtgaagactactggcagcgccactatgttggcgctcgtcgggtaatgaccccaaaaacacttcgctaaaactttaccctgttgttacggcaacagggtaagttcatcttttgtctcaccttttaatttgctaccctatccatacgcacaataaggctattgtacgtatgcaaattaataataaaggagagtagcaatgagtttcgaattacctgcactaccatatgctaaagatgctctggcaccgcacatttctgcggaaaccatcgagtatcactacggcaagcaccatcagacttatgtcactaacctgaacaacctgattaaaggtaccgcgtttgaaggtaaaagtctggaagagattattcgcagctctgaaggtggcgtattcaacaacgcagctcaggtctggaaccatactttctactggaactgcctggcaccgaacgccggtggcgaaccgactggaaaagtcgctgaagctatcgccgcatcttttggcagctttgccgatttcaaagcgcagtttactgatgcagcgatcaaaaactttggttctggctggacctggctggtgaaaaacagcgatggcaaactggctatcgttagtacctctaacgcgggtactccgctgaccaccgatgcgactccgctgctgaccgttgatgtctgggaacacgcttattacatcgactatcgcaatgcacgtcctggctatctggagcacttctgggcgctggtgaactgggaattcgtagcgaaaaatctcgctgcataataactgatggcaaatgcagcattgcctgaagcgctacgcttatcaggcctacgcggatcatcgatgtaggtcggataaggcactcgccgcatccggcaagataaatcgcacgttgtcagcaactgtaacgcagaaggttatccttctgcgtttttgtttaattagctgttagcaacgcaaactgtttcaggttgttttctggcactcataaacaccagcaataatgccagtcccgcgacaatcgctcccatcaccggcacaaagctgtatcccagcccagcggaaattaccgcaccaccagcagctgctcccagcgcatttccaagattaaaggcaccaatattgacactactagacagacctggcgcttcactggcgacacgcatcacgcgcatctgtaacggcggtacgaccgcaaaggttgctgcgccccacaccaccatgctaatagctgcgccgaactcattgcgggccaggaacgggattgccagcataatcaccatcaacaacaacaaaaagcctttcaacgtgccgttaacactacgatctgccagtttgccgccgagatagttaccgatagagaatccgacaccaatcagcaccagcattgccgtgacgaacaccggtgttgcgtgggtaatactttgcagtaccggagagatataggtgtagagagtaaacattgcaccagctcccagtaccgtcgtcagcaatgcagacagcacctgcggacgcattaataccgccagctcttttttcacttcaggtcgtgcccctgcaccacctttaggtaaactgaagaacagacttaccatactaatcactcccagccccgccgttgccagaaaactcatccgccagccgatggtttcacccaaccaggtcgccgccggcacgccaccgatatttgccagggttaaccccataaacatagtggcaactgcgctggcctgtttatgttttggcaccacgcttgcggccacgacactacccaaaccaaaaaatgctccgtgattcaggctggtcaaaatgcgactaagcatcagggtcatataatccggcgcgatggcggaaagtacgttgccgagcgtgaaaattgccatcaggaaaatcaacgcactgcggcgggcacgatgagaaagtagaagcgtcatcagcggcgcgccaaccattacgccaactgcataggcactgattaacattccggcagcgggaatgctgacatccacaccgcgcgcaatgacgggcaacaagcccattgggctgaactccgttgtcccgataccaaacgcgccaatcgccagcgccagcaacggatagttaattttcatgccttatctccacctcttcgcgtcattacgcgatattcattaaagtggcgaaagcatgacagcaatcacaaaaaaatgaaaataacaaaaagagaaaacacttttgccattttgctaacaaacaggaaggagatgcgagggagaacgcgctccctcgagaggaaatcagtgcagcgcggcagtcaaacccacggctacgatcaaaccgaggacgataatcgttgttaccagtgaaaatttaaggtcggtgctcatcaagttttctccttttttattaccacacaaaaagtgatattacgcatttttacacactgtgatgaaaaaatctcccgtcatttataatgataagtgtttttaccacttccccttttcgtcaagatcggccaaaattccacgcttacactatttgcgtactggccattgaccccttcctgacgctccgtgtcgtttttccggcgtaccgcaacacttttgttgtgcgtaaggtgtgtaaaggcaaacgtttaccttgcgattttgcaggagctgaagttagggtctggagtgaaatggaatggcaacaataaaagatgtagcgaaacgagcaaacgtttccactacaactgtgagtcacgtgatcaacaaaacacgtttcgtcgctgaagaaacgcgcaacgccgtgtgggcagcgattaaagaattacactactcccctagcgcggtggcgcgtagcctgaaggttaaccacaccaagtctatcggtttgctggcgaccagcagcgaagcggcctattttgccgagatcattgaagcagttgaaaaaaattgcttccagaaaggttacaccctgattctgggcaatgcgtggaacaatcttgagaaacagcgggcttatctgagcatgatggcgcaaaaacgcgtcgatggtctgctggtgatgtgttctgagtacccagagccgttgctggcgatgctggaagagtatcgccatatcccaatggtggtcatggactggggtgaagcaaaagctgacttcaccgatgcggtcattgataacgcgttcgaaggcggctacatggccgggcgttatctgattgaacgcggtcaccgcgaaatcggcgtcatccccggcccgctggaacgtaacaccggcgcaggccgccttgccggttttatgaaggcgatggaagaagcgatgatcaaggtgccggaaagctggattgtgcagggtgactttgaacctgaatccggttatcgcgccatgcagcaaatcctgagccagccgcatcgccctactgccgtcttctgtggtggcgatatcatggcaatgggcgcactttgtgctgctgatgaaatgggcctgcgcgtcccgcaggatgttagcctgatcggttatgataacgtgcgcaacgcgcgctattttacgccggcgctgaccacgatccatcagccaaaagatagcctgggtgaaacagcgttcaacatgctgttggatcgtatcgtcaacaaacgtgaagaaccgcagtctattgaagtgcatccgcgcttgattgaacgccgctccgtggctgacggcccgttccgcgactatcgtcgttaatcacccgttgcgggagtctcttccggctcccgcagccactccttattcagcgtctcactatcgccgagatactcaagcaaccaggttaacgcagggctcatatcattttgctgccatgtcagacaacatgcgctatccggaaaggggttttccagttctaatgctacccacttcccctcattaagccacggtttggcgaaatgtgttggcaccatccctatgcataatcctgcgctgatacaggttgcgctactttcccagtcaggcacgacaactcttttttggttatccagcaaccaggtaatacgtttaggtagcgttcggctggtgtcttcgcgcaccaagctcggccagttgcgcaacgtatcatcgctgaacgggccatccatcaacgccagcgggtggtgactggcaacaacgcaactccagcttagcatccccatatcccggaaggcataacgaccgcctaccggaatcgcgcgtgttgcgccaatcgccagttccacgcgcccgtcggaaagcgcatcccagacaccgttgaacacttcctgaaagacaagaagttcgacatcatcaaaatggcgataaaaatcaacgatcatctgccgtgtacgttctggcctgacaatattatccactgcgatagctaactgaccgcgccagccgttcgctatctgctgacattgctggcgggtgatctgcatttttttgacaacagagcgcccttctttgagaaaccacgctccagcagcggtcagctccacatcacggtgccgtcgttcaaagagcggcaccgccagccactcttccagctgacgcacggtatagctgaccgcagaaggaacgcgatgcagctcctgtgccgcagcgctaaaactaccattacgcgctaccgcatcaacaacttcgagactatattcactccacatagtctgcctgcaaaatttttgaaaccagtcatcaaatattaccgtttcacaacactaatttcactccctacactttgcggcggtgtttaattgagagatttagagaatatacatgcaacctgggaaaagatttttagtctggctggcgggtttgagcgtactcggttttctggcaaccgatatgtatctgcctgctttcgccgccatacaggccgacctgcaaacgcctgcgtctgctgtcagtgccagccttagtctgttccttgccggttttgccgcagcccagcttctgtgggggccgctctccgaccgttatggtcgtaaaccggtattattaatcggcctgacaatttttgcgttaggtagtctggggatgctgtgggtagaaaacgccgctacgctgctggtattgcgttttgtacaggctgtgggtgtctgcgccgcggcggttatctggcaagcattagtgacagattattatcctagtcagaaagttaaccgtatttttgcggccatcatgccgctggtgggtctatctccggcactggctcctctgttaggaagctggctgctggtccatttttcctggcaggcgattttcgccaccctgtttgccattaccgtggtgctgattctgcctattttctggctcaaacccacgacgaaggcccgtaacaatagtcaggatggtctgacctttaccgacctgctacgttctaaaacctatcgcggcaacgtgctgatatacgcagcctgtagtgccagtttttttgcatggctgaccggtagtccgttcatccttagtgaaatgggctacagcccggcagttattggtttaagttatgtcccgcaaactatcgcgtttctgattggtggttatggctgtcgcgccgcgctgcagaaatggcaaggcaagcagttattaccgtggttgctggtgctgtttgctgtcagcgtcattgcgacctgggctgcgggcttcattagccatgtgagcctggtcgaaatcctgatcccattctgtgtgatggcgattgccaatggcgcgatctaccctattgttgtcgcccaggcgctgcgtcccttcccacacgcaactggtcgcgccgcagcgttgcagaacactcttcaactgggtctgtgcttcctcgcaagtctggtagtttcctggctgatcagtatcagcacgccattgctcaccaccaccagcgtgatgttaagtacagtagtgctggtcgcgctgggttacatgatgcaacgttgtgaagaagttggctgccagaatcatggcaatgccgaagtcgctcatagcgaaagtcactgatctatatcgatatacttatacttaggctgctaacaaaattttgttgtatgattgaaattagcggcctatactaatttcgagttgttaaagctacgataaatattatgtttttacggggacaggatcgttcccgactcactatggatagtcatttcggcaagggttcctcctttccctctgttctacgtcggattatagactcgcggttttttctgcgagatttctcacaaagcccaaaaagcgtctacgctgttttaaggttctgatcaccgaccagtgatggagaaactatgagtagtagctgtatagaagaagtcagtgtaccggatgacaactggtaccgtatcgccaacgaattacttagccgtgccggtatagccattaacggttctgccccggcggatattcgtgtgaaaaaccccgatttttttaaacgcgttctgcaagaaggctctttggggttaggcgaaagttatatggatggctggtgggaatgtgaccgactggatatgttttttagcaaagtcttacgcgcaggtctcgagaaccaactcccccatcatttcaaagacacgctgcgtattgccggcgctcgtctcttcaatctgcagagtaaaaaacgtgcctggatagtcggcaaagagcattacgatttgggtaatgacttgttcagccgcatgcttgatcccttcatgcaatattcctgcgcttactggaaagatgccgataatctggaatctgcccagcaggcgaagctcaaaatgatttgtgaaaaattgcagttaaaaccagggatgcgcgtactggatattggctgcggctggggcggactggcacactacatggcatctaattatgacgtaagcgtggtgggcgtcaccatttctgccgaacagcaaaaaatggctcaggaacgctgtgaaggcctggatgtcaccattttgctgcaagattatcgtgacctgaacgaccagtttgatcgtattgtttctgtggggatgttcgagcacgtcggaccgaaaaattacgatacctattttgcggtggtggatcgtaatttgaaaccggaaggcatattcctgctccatactatcggtagcaaaaaaaccgatctgaatgttgatccctggattaataaatatatttttccgaacggttgcctgccctctgtacgccagattgctcagtccagcgaaccccactttgtgatggaagactggcataacttcggtgctgattacgatactacgttgatggcgtggtatgaacgattcctcgccgcatggccagaaattgcggataactatagtgaacgctttaaacgaatgtttacctattatctgaatgcctgtgcaggtgctttccgcgcccgtgatattcagctctggcaggtcgtgttcagtcgcggtgttgaaaacggccttcgagtggctcgctaaaggctattctatcgccccctctccgggggcgatttcagatcaggcttctgtgcctggttgattcatggcattttctcgtgccgccagcacacgttctaccgtatctaccactgcctgagtttgtggatcgatttcaatgttgacgcgtgcgccaagttttttcttcccaagagtcgtgcgttccagtgtttcccgaattaaatggacgcaaaaacgcgttggcgtgacttcgccgacggtcaggctaataccgtcgatgccaataaatcctttgtacagaatatatttcatcaactgactatcctggactttaaaccagatctggcgattattttcactggttaatattttcgccacttcagcagtggtcataatatgaccactcattaagtgtccgccaatttcatcactgaatttcgccgcacgctcaacgtttacccaatcccccacttttaaatcgccaagattggtaatgcgtaacgtttctttcatcaggtcaaaactgacatggttgccgttaatttccgtcacggtcaggcagcaaccgttatgcgccacggaagcaccggtttccaggccgtccagcatgtggtcgggtaactccaccacatgcgtacgaaaatttggtttctcgtcaatgctcaccagttttgcggtgccctgtacaatccccgtaaacatacttacaactcctgaaatcagttaagacattctgttcagcacaatagcaggtggaaaacgcccttaccagtgaaggggtaagaatggctattttttcactggagaattaataaatcctcgctacaatagactgaatttcccctgcttcttctttttgctgcccattcaggcggctttttagtctctcatataactacaaataaaaggtgttcacgtgcagaagtatatcagtgaagcgcgtctgttattagcattagcaatcccggtgattctcgcgcaaatcgcccaaactgcgatgggttttgtcgataccgtgatggcgggcggctatagtgccaccgacatggcggcggtcgctatcggtacttctatctggcttccggcgatcctctttggtcacggactgctgctggcattaacgccggttatcgcgcaattaaatggttccggtcgacgtgagcgcattgcgcatcaggtgcgacaaggtttctggctggcaggttttgtttccgttctcattatgctggtgctgtggaatgcaggttacattatccgctccatggaaaacatcgatccggctctggcggacaaagccgtgggttatctgcgtgcgttgttgtggggcgcgccgggatatctgttcttccaggttgcccgtaaccagtgtgaaggtctggcaaaaaccaagccgggtatggtaatgggctttatcggcctgctggtgaacatcccggtgaactatatctttatttatggtcatttcggtatgcctgagctcggtggcgttggttgtggcgtggctactgcggcggtgtattgggtcatgttccttgccatggtttcttacattaaacgcgcccgctccatgcgtgatattcgtaacgaaaaaggcaccgcaaaacccgatcctgcggttatgaaacgactgattcaactcggtttgccgattgcgctggcactgttctttgaagtgacactgtttgccgtcgtggctctgttagtgtctccgctcggtattgttgatgtcgcaggacaccagattgccctgaactttagtagtctaatgttcgtgcttccaatgagcctggcggcagcggtaactatccgcgtaggttatcgtctgggtcagggcagtacgctggatgcgcaaaccgctgcgcggaccgggcttatggtgggtgtctgtatggcaaccctgacggccattttcacggttagtctgcgggagcaaatcgccctgttgtacaacgacaatcccgaggttgtaacgctggctgcgcatttgatgttgctggcggcggtatatcagatttctgacagtatccaggtgattggcagtgggattttgcgtggttataaagatacgcgttccattttctatattacctttacggcttactgggtgctgggcttgccaagcggctatattctggcactgaccgatctggtcgttgaacctatggggccagcaggcttctggataggctttattattggcctgacgagcgcagccattatgatgatgttgcgtatgcggttcctgcaacgtctgccgagtgccatcattctgcaacgagcatcccgctaataaagacaaggcgcaaccttcacgggttgcgcctgtatttttacgcaggctggagcgttgcgccaatcccgtcttcgtctggctgtaatttcagagcgttacacagagtttgccgactggcatctgttatctcaacgtgtatatccccggtaacttcccctttcacattgatgaagtcaggactaatttcttttgcactggtttgcaggcaaatcgctccctctccgcgcaggcgtttcactttcagttgcacatgcgttgccgcatcagtgatcagccacagttttccaccattcagattgatgttaccaacaatgaaagtgacactgtcaccttttaccgtactgccgtctagaatcaacacaccgccctgctgtacagtaatcgtactttgttgcagctctgcgccataaccaataatcatactagcgccgtccagtaatgcaacactcccggtcagttcaaccggtgcgcgatcttcctctacgacaaaattttcgtccgcgctggtgggactcaacaggatcactgtcccaccttgtattaccgcgttttccagcgtaccggcatgcacttcagcccgaccacccacattcacggacaggttttgcgtcttaccggaactgtagagctgaaggccatccgtccccagacgataaatggatccattctcaacaatagtgtcagagtcttcaccaccgagattattcatggtgccaccagcaagcaacgtatcactggctttcccggccagcataaaaacgccgccctgattaatctcacaattgctggcttccccacctggatacaccaacaattcaccaccttcatctaccacgaccgcactggttgtcccattaaccaacaggccgccctcttgatcgagaatgattttttccgcgcgatgtccttccagtacacgcaggttaccgccattttccagcaacaaaccgcaggcataacctttatcaacgctgaattcaccttcgggatggcggccattaaccgtagcgagcgtagagagactaattgcgcctccctcggactgaacaatatctgtggcaatggcaccatcgctgacgcttagcgtgccattgttaccgtactgtgtgcatttggcgatcccaccggttgccactttcaaccagccagcccccgtgaccacggtattttcggctcttccgccagcttcaacaatcaactcgccttcagtaagttgcgtcgcgccaatgacctcgccggtcttaacaatttgcacgttcccgtcgctcatcaagtttttcgcatcagatcccatgatttattcctttgctgcatctgtgtgcctttattgctacctaagtgtaaaggctacggaggatttatccacgacagatttgagatggtggcaaacaactctgtttaaactctgatacacgaattattgggttgtatcagatgtaaatgcgatcctgaataaaaatcacccttgcaaatcaacaaaatatagccaatttgcttaaaagctctgcaaacggtcgaaatagcgcagaaaattacgttttgcctcttgccaccttcccactctgccgctaatattcgtccccgttgtcacctacaacgttgcgttcatagctcagttggttagagcaccaccttgacatggtgggggtcgttggttcgagtccaattgaacgcaccatcctgcgtccgtagctcagttggttagagcaccaccttgacatggtgggggtcggtggttcgagtccactcggacgcaccagattttcttaatctggtcttctcctttttccctctgtttcttctctgtatccaatacgttaaaagatttacactgtcttcgtatgcgttatcagaaggagaatcgctatggcaactttgttacaacttcattttgcttttaatggcccatttggcgacgcaatggctgagcagcttaaaccacttgctgagagcattaatcaggaacctggttttctgtggaaggtatggacagaaagtgaaaagaaccacgaagccggtgggatctaccttttcactgatgaaaaaagcgcccttgcctatctggaaaaacatactgcccgactgaaaaatctcggcgttgaggaagttgtcgccaaagttttcgatgtcaatgagccacttagtcaaatcaatcaggcaaaactcgcctgacagaatttaatcaagggcggttagcgcccttttcatccctgtctgaaatttctcaaattctaaaaatctcaaccaaacttatctgataacactaaattcgaaagaatgcgtacaggtaagtaacaatgaaaaaaattgctattgtgggtgccgggcctacggggatctacaccttattcagccttctacagcaacaaactccactttctatttctatcttcgagcaggctgacgaggccggtgtcgggatgccatacagtgatgaggaaaacagtaaaatgatgctggcaaatattgccagtattgaaataccgccgatttattgtacgtatctcgaatggctacaaaagcaagaagacagccatctccagcgttatggcgttaaaaaagaaaccttgcacgatcgtcagtttttaccgcgaattctgctgggcgaatatttccgcgatcaatttttacgactagtagaccaggcacgacagcaaaaatttgcagtggctgtttatgaaagttgccaggttaccgatctgcaaattacaaatgctggcgtcatgctcgctacaaatcaggatttacccagcgagacgtttgatttagcggtgatcgccacgggtcacgtctggcctgatgaagaagaagcaacccgaacgtattttcccagcccgtggagtggcctgatggaagcaaaggtcgatgcgtgtaacgtgggtattatgggaacatccttgagcggactggatgcggcaatggcagtggctattcagcatggtagcttcattgaagatgataaacaacacgtcgtttttcaccgcgataacgcaagtgaaaagctaaatatcacgttgttgagccgcacgggtattttacccgaagccgatttctattgccctattccctacgagcccttacacatcgtcaccgatcaggcattaaatgctgagattcaaaaaggcgaagagggccttttggatcgggtatttagattgatagtagaggaaatcaagtttgctgatccagactggagtcaacgcatagccttagagagcctgaatgtcgattcctttgctcaagcctggtttgccgagcgcaaacaacgcgacccatttgactgggcagaaaaaaatctccaggaagtcgaacgcaataaacgagaaaaacatactgttccctggcgttatgtcattctgcgcctgcatgaagccgtacaggaaattgttccacatctgaatgaacacgaccataaacggttcagtaaaggccttgcccgggttttcatcgataattatgcggcaatccctagtgagtctattcgtcgcctacttgccttacgtgaagcgggaatcattcatattctcgccctcggtgaagactacaaaatggaaattaatgagagccgcaccgtcctgaaaacggaagacaacagctacagctttgacgtttttattgatgcccgcggacaacgtccgcttaaagtgaaagatatccctttccctgggctacgcgagcaattacagaaaacaggggatgaaatccctgatgttggcgaagattatacgttacagcaacccgaagatattcgtgggcgcgtagcgttcggcgcgttgccctggttgatgcacgaccagcctttcgttcagggacttacggcatgtgcagaaattggtgaggcgatggctcgggcggtcgtaaagcctgcatcccgtgctcgtcggcgtcttagctttgattaaaggtaaagctatcagcactcaacaaactgatgctgttcattaagacgatagcggactccggctcgaatattgttttcaccttcaatggcgacggcgaagcgaactctttcgccgtcatgatatgccagtgcggcgcttcctcctggcccgagaataatactgtcgaccacgcccgtgctcactaccgtactattttcaccgctggcaatgatgtgtacattgtcgccgctgttggcaattctggcgtttgcgccaaagctggcgatttgcaccaggtcaccattactggcgacatgacaccgttcacccaatgtacaaacgcgtactcgcattccggtattcgcaatccgactgctatctccagcgctgcttatccggctagaattaccggttacagcaacccgtgcgcgttcaccggagctgccaatgtgactgttaaagccgacacttccaatccgcacgctataacccatactggcaatttgcgcggcatacccagcggttgcgattctggcgttatcctcacaacagccgatgcgagcatgatcgtcgctgcgggcaaactgactgcaaaatggtctctctccggggtctgtggccagtttttgcatagaggaaacttcctgatgcgcgaagttttcatccgccagccattttttccacgcatactcaaccagactctccgcccagtccgtatatccttcctcaatcagtgcatgatgaatatcggcataactaccgccgcgtgggaaatggcgcaggaaccagcgatacatcaccgctccgatacgccattctcgcaggtctgcttgtgtaatgatcattcgttagtgccggtgatagccatcgaccatgcttttaaaggtttcgtgtggcgtacgccccgtggtgcaaagataaagatgaccgaagataaaaaagaggcttataaatgccagagcaaaatgtgtctgcaataaccagtatcttacgccaggaaacacatctcccacggcttgcggatagagacacagcagccccgtcaatagtaacaacggcagcaatccatacatgacaccaacataggcgacctgctgtaagggattaaatttagactgggttgttgccgggaaaggatgttcttccccctgcataatgccaaacaaataaaatcgcgtttgttttgccgctcgttccagccacccctgacgacgaatgcgatagtggtgaccattatccccaacggcattgatcagcacaaagccgagccagcatgccagtaacaaaaatccgcaaacttcatgcaccgcaaccagacttttaaccgcagttgcgcccaccatcgcaaagtgatttatcagcccactggccagcaacaatacaaagagtaacgcattgctccagtgccataatctgaccgctttgctgtaaagataaatcttctcaccatgatcggtggcacttttcttcacgccacgagcacgaagcaaggcatgcagccccagcaccaaccacatcccaaccagcaatactccggcaatgatcaaccacaccggccaaaattcgggagtgaactgtggcacatagttcgctaactggctctgaaactgttcagcatgttggctcgggttcatacattttcctttttaatcaaatgttgaccgaaccggcgatacagatgcggtttcccggcaccaggtagctgatattgatagtatttattttgctgcaaccacgcctgaatttctgggctatcttcgcgaccaaagatcaatgcgtgttccgggcaggcgctgacgcaaatgggcggaaagccttttgccagtcgggactcagcgcagaaatcacatttatctgccactttagtgacagggttaaggtagcgaacctggtacggacaagcgccaatgcaataactgcagccgatgcactggcttttttctacccgcacgatcccctgctcatcacgccagctcgcccccgtcgggcaaacgtcgatgcacggagcatcttcgcagtgctgacaactctggcgaaaaaagtgatactgcgtttcgttgtcgttatcggtgactggaatgtgtgctatgcttaaacggcttccctgagcggggacgtggttagttttacggcatgcgcgggcgcaaatattacagccattgcaccgactctcgtcatgaatcatggcataccgaacttccttttcttgcctcgtgttcgctaacagagaagacgcagaaccagtaaaaaagattactgttcccatccccagaacaaatttgcgtcgagtgaaggacatctgattatcccctaatgcagtggctgcaactgtccaccctatccatgacatctccctgaaatttcaggggttctgaaactgctctacctcgaaccattcgcataagccataagccttgccataggtcataaatcgctcgctaaacaagtacaacaccgccgtgctactctccacctgccgtatatcggcatattcaggtgcaacatccatcgcggcgatcgcggcttcaatctgcgcttcctggaagtaatatggcgcttgcatcagcatggcgactttgtaaggacgaggatacgtctggcactcaaaacgaacggcgtgtgcaatggcgcgacaaatgtcctgctccacaacttgcaaagacatcgccgcgtagttttcactcatggcctgcgtactgtaatagtaatcatccttgcttcccgtcaaacaagcgatatccgcgtagtctccgttctgcttaatgctttccagcaaaacactcagttcctcttctgcaaccaaatagggtgggctgagaaacacggcgcgcgccaccagctgcccagccgcagaatgctggcgaatgaactcagccaggatttcagcaggttctggttcggttaccgtatcaacggggtgacgcatcccctgcaaccattgccgcttcgcctcgtcaacttcgctgactttcgctaacggcaattcatcctgatggttcatcttacccattccttacgcaggcagtagattgtgtgctgccagatcggcggcaatatcttccagccccagacgctgcaatgtttcgcgggttggacaaccaagctgtgggtcccagcccatttctttgtagaacatcgtgaggctagcatgcatatcgtcacgatccattttgtcagtaccttcagtaaagaccgggatctgcggatccttgtcgaatacccaggaacagataagatcgtgttcattacgcatatctttggtttgcatcagttttaccgtgtaggcacgatgcaacgtaaaaatacgctctgcagctaaatctaatttttcctgagtcatctcttcgccggtgatcgctttgaagaatttggcttcaagcgccagatcgccccggtaattacggcttttcagcgggctaacggtcattggccagacccagttgcacagggtgacggcgttatgcaaacagacccgcaacaggctccactttgcatatttaatttttgcgtcattgattggcgtgtagtttttggtttcatcgtaagcatcttcagaaccaaaaagttctttcgccacttcacgttgcagtttcaatggcaagccggaaccaataaagttgatatgggtatgcgtcatgcagtcacggttgaacatacagttaacaatggaaccgacctgcgcactcgcttcattggcatggtgaaccggatagccaaacgggctccagagtttatttttcgcgtagccccagtactcttcacccaaattccagcgttctgcgatggcataactaccatcagccaggtgactcagctcacccacacgatgcgccagacggtagtaaaaatctttaatgaagttaacgtcacccgcttccagttgatcccagcgaatttctgcatactcttcagctggcagaacacgcttgaacacacctttgctgtaacaataagtaaagtcgcgatgcaactgcccgtagttacaccataggccgtagtcatcgaacaaattcagacccaccaggttaccaatcacacgaccatcgtctttatcttcaaaatctttcggcccgttcgggaagatggtggtatggacaaagtttgctacacaagtgttaccacctgtgctgggcacgccaaactctttcacccgaggaatattcatttgggtcatacaacggatcgggcaagagtggcagccgctcatttttactgtgtatttctctgccgccggtcctaagtcaaaaacggatttataggtacgaaagccgaccgtattctgattgcctggcggaatttcacccgtttcaatcggaccaccttcagccgcgccccaaaacagccctttacgtgctgtccagcgactcttgggatcactatactctgcccagctttgtggcgtacttggcacgacatggttgttattcgcaccaataagttcagtcatcatgtaatcattgagacgcttcatctcctgacgatcggcaatgttgacccctttcgtcccttcaaccgcaatcgctttcaggtttttgctacccattattgcgccagttcccgcaccgccgctgtggttacggctattcaacatgccagagagaggaacaaggttttccccagcctgaccaatagccgccacacaggtttccggactggtcaatcgacaaatttcttccgtcgttgcgcgcgtcccttttccccataagaaatcggctttttccaggctaactttgtcatctttaatcttcagccataccggacttttcgccttcccttcgataataatgacgtcgtatccagcgaatttcatttgcgctgcaaaaaagccacccatatgggcatcgacgactaaatttcctttggtaaaagtagaaagactggtgatatttacgcgagaactacagggggcaccagatccagttaatgggccggtagcaaagactaatttattcgcttcatcgaaaggtttcgtgcctggcggtacttcgtcatacataattttgtagccgaagcccatgccaccgacaaaacttttaaacttactggaatcttcgagggtaatatttcctgtcgtgagattgactcttaatatattacctgtccaaccgttagccatgattttttcctttgcaagattcacacagtaatatctttccactcgataatttttaacgcccctgttgggcaggcgtttgcgcattcaccgcataacacacatttgctggattttttactttcggtatttacggtggccatcatccacgggcatgccgtagtacaggcgctacagccaatacagcgtttatgatcgacggtaatacagccttctttctgctgccaggtaatcgcaccaatcgggcagacgttcatgcattgcggctctttgcattgacggcaggtgtccgcggtatagttgagatcgccatacaggccgccgccagagccaaccccgttgtcgccaaagaaataattgcgatggattttgatacgggagaagaatgtccctacactgccatcgttgaagttggtacaagagatttcacagcggtggcaacccgtgcatcgcgctcgctgggtcaccagcacccctttgggggtatttatcaaccctactgtgccgctatcaatatcttcctgtttgcaacccaaaagactcagtaacgcaggggcaattgttagaccagcaaggccttttccacttatacgcaagaattctaatcgcgttaagccaatatctaatagtggacgatcaaccgggttcatttatttcgcatcctcttcgcaaacacagtgctgacaattcagcagcctgatattaagcattcaactaatacgctgctgactctgtccccaacaccagatattttccctaacccgatagtgtatgagaaaagattaacgccgataaactaatcctttatggttaggagaaaaaataatgtgattattctgagcccttaacattgatcgttatcaattaaaattacaaagcaagaaattataagtgaactgatatttattatcatttgaaataaatttaacttaagcgacaattatttgtgactttcattgcagaaaataaaaataacattatcgctataaattaaaatacataccgaaattcgtataatttcagcagttgttatttagaatgattaactggaccgcaactgaagcaagaatatcaggatgaagcttaccgcctcatcctgaatggtcattttaccagtgcgttaatgacggtttccatcgcctgcttttccagctcactgcgctgaatgcgtttattggctaatgctgtacgtaatacgcctgcgataacaatatgctttggttcctgccccagatcgcgcatttccagcacaactttaccgacaactctgcacatttctcggtacagttcatcctcttttgtccgatttcccattctttatacctatttatcatgccaactatcagcatatatcaatctaaccaattaaacaaaaatcaaacaaaatcagacaaataacgcgataaattattttaactgtagcaattgagcgatgatatatttatacaccggatgaactttcacttatcctcacactgacaacttcggcaccagacgttgcgcaaacagtgaagtttttgcgtaaccttttccctggaacgttaaatctttgataacaatttattgtctaacaagttgtatattttttgaaacgctgtttttgttttccttttggattaatttcagcgtataatgcgcgccaattgactcttgaatggtttcagcactttggactgtagaactcaacgactcaaaaacaggcactcacgttgggctgagacacaagcacacattcctctgcacgctttttcgatgtcacctatccttagagcgaggcaccaccactttcgtaataccggattcgctttccggcagtgcgcccagaaagcaagtttctcccatccttctcaacttaaagactaagactgtcatgaaaaagaccaaaattgtttgcaccatcggaccgaaaaccgaatctgaagagatgttagctaaaatgctggacgctggcatgaacgttatgcgtctgaacttctctcatggtgactatgcagaacacggtcagcgcattcagaatctgcgcaacgtgatgagcaaaactggtaaaaccgccgctatcctgcttgataccaaaggtccggaaatccgcaccatgaaactggaaggcggtaacgacgtttctctgaaagctggtcagacctttactttcaccactgataaatctgttatcggcaacagcgaaatggttgcggtaacgtatgaaggtttcactactgacctgtctgttggcaacaccgtactggttgacgatggtctgatcggtatggaagttaccgccattgaaggtaacaaagttatctgtaaagtgctgaacaacggtgacctgggcgaaaacaaaggtgtgaacctgcctggcgtttccattgctctgccagcactggctgaaaaagacaaacaggacctgatctttggttgcgaacaaggcgtagactttgttgctgcttcctttattcgtaagcgttctgacgttatcgaaatccgtgagcacctgaaagcgcacggcggcgaaaacatccacatcatctccaaaatcgaaaaccaggaaggcctcaacaacttcgacgaaatcctcgaagcctctgacggcatcatggttgcgcgtggcgacctgggtgtagaaatcccggtagaagaagttatcttcgcccagaagatgatgatcgaaaaatgtatccgtgcacgtaaagtcgttatcactgcgacccagatgctggattccatgatcaaaaacccacgcccgactcgcgcagaagccggtgacgttgcaaacgccatcctcgacggtactgacgcagtgatgctgtctggtgaatccgcaaaaggtaaatacccgctggaagcggtttctatcatggcgaccatctgcgaacgtaccgaccgcgtgatgaacagccgtctcgagttcaacaatgacaaccgtaaactgcgcattaccgaagcggtatgccgtggtgccgttgaaactgctgaaaaactggatgctccgctgatcgtggttgctactcagggcggtaaatctgctcgcgcagtacgtaaatacttcccggatgccaccatcctggcactgaccaccaacgaaaaaacggctcatcagttggtactgagcaaaggcgttgtgccgcagcttgttaaagagatcacttctactgatgatttctaccgtctgggtaaagaactggctctgcagagcggtctggcacacaaaggtgacgttgtagttatggtttctggtgcactggtaccgagcggcactactaacaccgcatctgttcacgtcctgtaatattgcttttgtgaattaatttgtatatcgaagcgccctgatgggcgctttttttatttaatcgataaccagaagcaataaaaaatcaaatcggatttcactatataatctcactttatctaagatgaatccgatggaagcatcctgttttctctcaatttttttatctaaaacccagcgttcgatgcttctttgagcgaacgatcaaaaataagtgccttcccatcaaaaaaatattctcaacataaaaaactttgtgtaatacttgtaacgctacatggagattaactcaatctagagggtattaataatgaaagctactaaactggtactgggcgcggtaatcctgggttctactctgctggcaggttgctccagcaacgctaaaatcgatcagctgtcttctgacgttcagactctgaacgctaaagttgaccagctgagcaacgacgtgaacgcaatgcgttccgacgttcaggctgctaaagatgacgcagctcgtgctaaccagcgtctggacaacatggctactaaataccgcaagtaatagtacctgtgaagtgaaaaatggcgcacattgtgcgccattttttttgtctgccgtttaccgttactgcgtcacgcgtaacatattcccttgctctggttcaccattctgcgcactctctacactaggcgcattgctggctgcgggagttgctccactgctcacgctaaccggataccctgcccgacgatacaacgctttatcgactaacttctgatctacagccttattgtctttaaattgcgtaaagcctgctggcagtgtgtatggcattgtctgaacgttctgctgttcttctgcgcttagtggtcgatgtacttcaacataacgcatcccgttaggctccacggaatatttcaccggttcgttgatcactttcaccggcgttcccgtccgcacgctggagaacaaggctttaatatccggtgcattcatgcgaatacacccactactgacgcgcaaaccgacgctgtccggcgcactggtaccatgaatgaggtattcgccattaccatgcgcgaggcgcagtgcgtaacgtcctagcgggttatttggtccggcaggaacgactggcggtaatttaatgccacgctccaggctacgctgacgaatgcctgccgtaggcgtccaggttgggttagggattttctgcccaacacgcgtttccatcaccggcgtttccagcccctgcaatccaatacctattggataaacctgcacaatattttctcccggcggataataataaaggcgcagctctgcaaggttaacgataatcccctgacgcggtgcatcaggtaataacagttgactaggaatagttatcgtcgtaccaggttttggcaccggggcgatagtgttattggcttcaaggatcaacattgccgcagtatcaaaacgtcgggcaatagcctgaaggtttttatccccttcttgcaccgtatacgtttgattttgcccaaccagtcggcttccggttggtggtagcggataatcaaccgcccaggcagcctggatggcgctaaaagcgccgataagcgtgagtgtaagcaaagacgcgcgtttcattgtaaacctcctgtatttgccggagactcacgctgaaacgtcggatggcgcttatgttcacctgaaaccaaaacactcctgtgcaggtcagtgtaaacattgaccatccggcaatgtgagccaaccggatgaaagctgtccttttagtttagctaagtgcagcggctttggcgcgaattgcgcgaatcatcgcttccagaccttgactacgagatggggtgagatgttgggtgagcgccattttttcaaaccacggacgcacatcgaaattgacaatatcctgcggcgtcatctgatcgtagagaataaagacgaccgcaataagccctttcacaatcgccgcatcgctgtcgccctgtaattcaataattccctgggcattctggcgcatgacaatccacacctgactctgacagccctgaatgctattttgtggacttctgtcttcgtcgcgtaattctggcagacgctggcccagctcaataatgtagagatatttctcttcccagttggcgcagcgtaaaaaattacgcagcaacttttctttatccggcaataaagccatagtgcctccctgttatcccagcaaacggtgaatacgttgcaggccggtcaccagacgatccacttcttcatgggtgttatacatggccaggctcgcccgacacatcgcagggacgttgtaataggccatcaatggcattgcgcagtgatgtccggtacgcacagcaatgccgtaattatcgagaaaactgccaacatcataggcgtggtgtttaccgagattaaaagcaataacgccaagcctgttttgtgggccatagagagtgagatccggtacagattccagctgacttagcgcataatgcatcagattctgttcatactcggctatgttattaagccccagcgcgctaacatactccagcgccgcgccaagaccaatgatgcccccggtattgggtgtaccggcttcaaaccgccatggtgctttggtccaggtagtgccttcactcaggctgacggtggcgatcatagaaccgcccccttcccacggcggcatctcctgcaacaaggcttctttcacataaagaatgccaattccggtggggccatacagtttatgcccggagaacacgtaaaagtcgcaatccagcgcctgaacatccaccggatgatgcatcaccgcctgagcgccatccaccagcacttttgcgccatgctggtgcgcaagcgtgatcatttccgccagtggattttctgtgccaagcacgttggagacatgagtaattgccagcaggcgagttttctcatcaaacagcgtaggcagcgtctccagttgcaacgtaccatcgggattgagcgggatcacacgcagctctgcgccaacgcgtgcgcaaagcatctgccagggaacaatgttagcgtggtgctccatctgactgatgatgatgttatcgcccgcccgcacgttgctgttgccccagctattggcgaccagattgatcccttccgtcgtgccgcggacgaacaccagctcttccgcgctacgggcattaataaacaggcttgcccgcttgcgcacgttctccattttctcggtcgcctgggcgcttaaggtatgaataccacgatgcaccgccgcgtagccatgacgataaaactcggcctcggcgtcaatcacctggctcggtttctgcgcactggcggcgctgtcgagataagccagcggcaaaccgtttacctcacggctaagcaccggaaagtcggcccgcactttgtcgacggaaaaaatcatcttgcacctcctggcagccgttgaccgattcgggccagcacctgctgtttaagcccctcatcacgcagtgcttccgtcagttcggcagcgaaggcgtaaatgatcatctgctgggcatcctgctgattgatcccgcggctgcgcagatagaatatctgttcatcatcaatacgccccaccgtcgcgccgtggctgcatttcacatcatctgcatagatttccagctgcggtttcgtatccacttccgccagtttgcccatcagcagattgttgttggtcatctgaccatccgttttgatggcgtgctgcgcgacgttgatcaaaccgttaaataccgcgcggcctttgtcgctgacgatagttttgtgcaactgtcggctgttacaaaaacctttattgtgttccagccaggtacgggtatcacacacctcgtttttcaccggcatcgccaggctattgatccgcagcgtgctgttttcgccattgagttgcgtactggtgttgtgtcgtaacactgcgccacccagcaggaaactgtggctaaatgcggtggcatcctcagccagcaacaaatcgttatgagcaaagtggtgactgagcgggttttcaaacgccagcttgatatgctgcaagtgggcattcgctgcgacgttgatagtgaaccgtgccccggtaaaatgacgagcatcattcaggctgacaaaatgttcgatcaccgttgcttcggcaccttccgccagatccagatgatgtcggtaatgggcagtgttcacctcttcacctgccacgccctgggtgatatgcattaacagcaatggctttgccggccgttgaccgcgcttcacggcgatatgcgtcacgctttgtgccaggctttccgtcaaatgcagaaacacttccgcctgaatagcgtcgggtaaaccctgacggtcgtcgttaatgctcacttcatatccgctgccttcagttgcatcgctcagtgcgggcacgtaacgcccatcgacaaacaccagccgcacggagtctaacgttaacgctaaggcatcacgctgctgtggggatatctctcccgcaatgctgacaaactggctattgatcagcccttccagcggcgtatatttccagttttcatgtttacgtgtcggcagtccggtacgcagcaattgttgtaaatgctgctgtgcttgcggggagcgttttgtcccttcagcttcaaacaagtgatgccactgttgcagcgcgttactgctgttcggtaagccagccataaccctgctcctccagttgtttgaccaacgtgaaatcgccggatttcacaattcgtccctgatatagcacatgaacgtaatcaggcttgatgtagtcgagaatgcgttggtagtgcgtaacaatgatgaaactgcgcttgccatcacgcaggctgttcacgccatcggcgaccacttttaatgcgtcaatatccagcccggagtcgctctcatcaagaatgcataactccggttccagcaccgccatttgcaaaatatcgttgcgctttttctcgccgccggaaaaaccaacgtttacgctacgggttaataaatcttccggcatcttcaggagagcgattttctcttccatcaaatcctgaaaatcaaagcggtcgagcgtttcctggccgcgatagctgcgcaccgcattaagtgccgtttgcaggaaaaactggttactgacacctggaatctccaccggatactggaaggccataaagatgccttcgcccgcgcgatcttccgggctcagcgcaagcaaatctttgcctttgaactcaaccgtgccgcccgtcacttcataatcttctcgcccggcaagcgttgcgcttaaggtacttttgccgctaccgtttggccccataatggcgtgaacttcgccgggatgaacgtcgaggcttaatccgcgcaggatagctttatcttccacgctgacgtgtaaatctttaatacttaacatgtttattccttatccgacgctgtgttcaagactgatggcgaggagtttttgtgcttcaacggcaaattccaacggcagctcgctgaacacgtctttgcagaaaccgttaacaatcatgctgatggcgtcttcttcgctgatcccgcgttgcaggcagtaaaacagttgatcttcaccaatacgacttgtcgttgcctcgtgttccagttgcgcactattgttacgacactcaacatacgggaaggtatgcgccccacaattagcgccaatcagcatactgtcgcactgagtgaaattgcgcgcattggttgccgtcggcatgattttcactaagccgcgataactgttctgactatgtccggcagagatccctttgctgataatggtgcttttggtgtttttaccgatgtggatcatcttggtgccggtatccgcttgctgatgaccgctggtcagcgccacactgtaaaactcaccaatggagttatcgccgcgcaaaatgcagctgggatatttccacgtaatcgcactcccggtttcactttgcgtccaactcattttgctgttttcgccttcgcacaaagcacgcttggtgacgaagttgagaataccgccggtgttgttatcgccaggaaaccagttttgtaccgtggaatatttcacctcggcgtttttatggatgatgacttccaccactgccgcgtgtaactgatagctgtcacgcaccggagcggaacagccttcaatgtagctgacgtagctgtcttcgtcggccaccagaatggtgcgctcaaactgcccggttttttctgcgttaatgcgaaaataggtggaaagttccatcgggcagcgcacgcctttaggcacataaataaacgtaccatcagaggctaccgccgcattaagcgcggcaaagaagttgtcattccccggcaccacggtgccgagatatttacgcaccagttccgggtgatcgtggatcgcctcaccaaaggaacagaaaataattccctgctccgccagtttttcgcgataagtagtggcaacgctaacactgtcgaaaatggcatccaccgccacctctttgccttcccgcacgggaacgcccaactgctcaaacgccgcctccacctctttacttaaaaaggcgttcgcgccagtttgctgcaccgcgccaggttcagacgcgcaagtgtcgtcacaattaccgcagcttggtgcactgtagtagctgtaatcctgataattcagcttgtcgtagtgcgctttcaaccagtgcggttcttccatctccagccatgcgcgataggcgtttagacgaaactccagcatccactccggctcattacgcttcgcgctaattgcgcgcaccacctcttcgtttatcccctttgccagctcatcggtggctaactgggtgaagaatccttctttataattcagcgggccgccggtccaggttttgacatcgtcagttgcttcagtattacgagacatagtaccgcttataccccaaagctttcgccacagccacattcattctgggctttagggttgtgaaatttgaatatctgattaagtccttcacgaacgaaatcgacttccgtgccatcaataaacggcatcgcttgcagcgggacaaacagcttcgcgccgtcgtgttcaaacagcagatcgtctttgtccggctcgctaacactgtcgagcacatagccaaagcccgcgcagcccgtttgcttcacgcctaagcgcacgccgaccatacccggctgctttgccaccagctcacggatgtgtatcgccgctgcgggtgtcagcgttaagccttgccaggcgaaatcttgtgggttaaaggttccactatgcatgtccatcgatttacctcacttcatcgctttcagcgtataacagcatgttagtgataatgattatcagttcaacccagcaaacgcaggggctttaccgtaaaacatgctttttgcctgcttttaataagcatagaccctgatgtgtgggttaacaggcacgctaagaattaggtatctcattgttagataatggttattatctaaggagcattaaggctgtgatgaaaaagaaaaagttgtattgaaaatgactatttaagagataggtaaaaaagtgcagcgttcagaaataagaaaacccttaagtctgtgcgacacaggcttaagggtttctaccccatccggcgcttatctccggcactctcagtggcttagctcttgaaggggcgataagaataatctcataaagctaacccgccgttttaacacaaactgcgattagtattatttttgaacaatatcaggcggtagataagcagtattaagaaggtcatcgaacctggacggaggttaatccaggtcgatttggcgaacttgcggcattaagtcaggatcaatgcacgcccagacgccaggcaaagtagatttcttcttttaattcagcagaagagagagtaagcaggtcagcaaattcaagttctagttgtttcagacgtttgagatattgggcaggactaagattgctctggtcacggcgtaaaaattcaatggccagctgggtgggatcaagttgagtagacatagcatcctcgcttttagacaagacctgcacagtataccaccgtttactgtgcagataatgaccaaaagcaatatgcgtcacacttttctggtgacaacgtcacaaaatggcggtcgtcaatcgactgctacagcacaaacgccctttctcatcgaagatttcaatctgccagacctggtgacggctaccgagatgcaacggtttgcatacgccgcgcacccgcccttctcgtgcgctgcggacgtggttagcattgatttccagaccaaccactttttgctcaccttcggtacataaataaccggcaacggaaccgatactttcggccagtaccacggatgctcctccatgcagcaacccgaaaggctgctttgtccggctgtctactggcattgtcgcttcaagggtgtcatcaccaatatgttcaaagcgaatatccaggaaccccaccatgtttccttcacccatagcattcagtgcttccagggtgattttccgtttccatatcatttaataatctccagtaaagcctgcacaggatggcgtacccccgtgccttcaacccgttttacctggctacggcaggaatatccggtcgccagacagcggttacgcggcagtcgctgcatagcctgatgccaggataactcatagatcccgaggctattttcatggtttttcgcttcatgtccgtaagtccctgccatgccgcagcaacccacgctgacattttccagtttcgcgccaaaacgggcaaatatcgcggcccattgtgctggcgcacccggcaaggcggtaacttcggtacagtgaccaaagaaataccaactttcaccgctgactgtagccactggctgactctcaagtgcgcttgccagccattcattcgccagtaagacgttaaactcgccacgctcctcgcccagcgccagtttatattcatcgcgataacaaagtaccagcgccggatcgacgcccaccattggcatacccagcttcgccatacggttgaggaaatccgccgtctttttcgccgtcttcgcaaaacgattaagaaaacctttaatatgctgggctttgccatttgggctaaatggcagtaacacaggctggaaacctaatttttcgaccagacggacaaaatccgccaccacttgcgcatcgtaatagctggtaaaggggtcctgcaccaccaacactgtgcgcgctttctgctctgcattgagagattcaagctgttccagcgtcatgtttgcgctgcgatgccccaccatttgttgttgtaggctggggacgctcagcagcggcaaatcaaccatgccgatatgtttttcgctgagtttgcgcaccagcggctggttaatgaagaagttaaaggttttcggcgcgcgtgccatcagcggcgcgtagctctcgaccgtagcgacgaggtggtcgcgcagcgggcgtaaataacgggtgtgatagagctgcagaaaacgagagcgaaactccggcacatcaattttgatggggcactgggtgctacacgctttacaggccagacagccgctcatcgcctctttgacttcgtgactgaagtcatattcgcctttattcgcatgccagctattgcgcgtgcgggcaattaacgtccgcaaactgacgccggattcaggcagttcttgttccagtttgagtggatcaacgccgcgatccgccaacaaacgcagccattcacgcaccagcgttgcgcgccctttcggactatgaatccggttctgggtgatcttcatgctcggacacatcggactacgggcatcaaagttgaagcataaaccgttgccgttacactccatcgcaccgcgccactgctggcgtaccgcaatggggatctgccgatcgaatgtaccgcgcttcaccgcgtccactttcatcatcggcgcatcgagaccttctggcgggcaaatcttccctgggttgagtcggttatgcgggtcaaatgccgctttcactttgcgcagttctgcaaaaagttcctcaccgaaaaacgccgggctgtattcagcgcgaaaacctttgccgtgctcgccccacaacaaaccaccgtatttcgcagtcagcgccaccacgtcatcagagatttgcttcatcaaaatctcttgttgaggatcgcacatatccagcgctggacggacgtgcaagacacctgcgtcgacgtgaccgaacataccgtagcttaagccgtggctgtcgagcagcgcgcgaaattcagcaatataatccgccaggtgttccggcggtacgcaggtatcctcagcaaacggaattggcttagcggcacctttggcattgccaagcagaccaacggcttttttgcgcattgcatagatacgttcaacccccgccagctcacggcacacctgccagccgatgacacctgcttgatgactggcgatcagctcatccaaccgcgcacagagtgcatttacccgctcatcaatcagcgcctcatcatcaccagcaaattccacaatgttcagcccgagcatctcttggtcaggcacatcggtaatcaactcgctgacggaatgccagacaatatcttcccgcgccagattcagcactttactgtccaccgtctctacgctaagcgcccgcgcctcaaccataaacggcgcgttacgcagcgcagagtcaaaagagtcatatttgacgttcaccagacggcgcactttaggcaagcgtgtaatatccagccgcgcttcggtaataaaggccagcgtcccttcactacccgtcagaatgcgcgtcaggtcgaactcggtcatctcatcgttaaagacatgacgcagatcgtaaccggtaagaaagcggttaagtttggggaagttgtcgataattaactggcgttgctgacggcaacgttgataaaccgtgttataaattcgcccgattgtggtattggatttacccagcgtttccgccaattcgacgggtaaaggttgcgtatcgagaatatcgccccccaacaacaccgcgcgtacgccaagtacgtgatcactcgttttgccatagaccaggcttccctgaccggatgcatcggtattgatcatcccaccgagcgttgcccggttgctggtgctaagttccggcgcaaaaaagtagccgaacggtttcaggtactgattgagttgatcttttatcaccccggcctcaacgcgcacccagccctcttcagggttaatttcgatgatgcggttcatatggcgggacatatcaacaataatcccctggttgagcgcctgaccgttagtgccggtgccgccgccgcggggggtaaagatcaggctactatagcgttcctgcgcggcaagacgggcgatcagcgccacatctgcggtactacgcggaaataccaccgcatcggggagaagttggtaaatactgttgtcggtgctcattgtcagacgatcggcataacttgtcgccgtatcgccggtaaaaccttgttgctccagctcttgcaaaaaattaagcaccagttgaacgacgccgggtgcctgggaaatctgtggaatcattatattgaccctttcctgcggtctgtgatgtaggtcgatacactattctttcaggctgctgcaatagcgcactgaaaggtgatgtttgtttactctatggatttcgtgttgcaggaaggcggcaagcgagtgaactccaggagcttacaatagtaagtgactggggtgaacgaacgtagccgcagcacatgcaacttgaaatacgacgagtaaatcgtttgcgtgttgcctgagttgttgtaccacatttttttctaacacgcccatcagaattaagggcagaatcggcctgttaaaaaccgctgaaattgctcatcattatgcaggtgagtttcgcgtgttcacgtcgcgtcgacgatttgacgcacaaaaaaggtgaaaagtagttatggtaaatgttcgtcagcccagggatgtcgcacaaattctgcttagcgtgctgtttttagccatcatgattgtggcatgtctgtggattgttcaaccctttattctcggctttgcatgggccggtacggtggttatcgccacctggccggtattgttacgtttgcaaaagatcatgtttggccgccgctctctcgccgttctggtgatgacgctgttattagtgatggtgtttatcatccctattgctttgctggttaacagtatcgtcgacggcagcggcccgctaattaaagccatttccagcggtgacatgacgttacccgatctggcgtggcttaataccattccggtgattggcgcgaagctgtatgcaggctggcacaacttgctggatatgggggggacggcgatcatggcgaaagtccgcccttatattggcaccaccaccacctggttcgttgggcaggcggcgcatatcgggcgctttatggtgcattgtgcgctgatgcttctcttcagtgccctgctgtactggcgcggtgaacaggtggcacaaggcattcgccattttgcaacccgtctggcaggcgttcgcggagatgccgccgtgctgctggcggcacaggctatccgcgcggtggcgctgggtgtggtggtgacggcgttagtacaggcagtgcttggcggtatcggcctcgccgtatccggcgtaccttatgcaacgttgctaacggtgttaatgatcctctcctgccttgtccagcttggcccgttgccggtactgattccggcgattatctggctctactggactggcgataccacctggggaacggtattgttagtgtggagcggtgtggttggcacgctggataacgtcatccgcccaatgttaattcgcatgggtgccgatttaccgctgatcctgattctctctggcgttattggtggtttgattgctttcgggatgatcggtctgtttattggtccggttctgttagccgtttcctggcgtctgtttgccgcgtgggtggaagaagtcccgccgccgacggaccaaccggaagaaattctcgaagaacttggcgaaatcgagaaaccgaataagtaatttctcatcaggcggctctgccgcctgattgttaaccaccgctaattgatatttgcttgctcttccccatattttcctgcttaccgccattcagctggtagtacctgtcgcaaattctttacagtttttaaactaatgagacgaatctgatcgacgcaaaaagtccgtatgcctactattagctcacggttataaatcaacatattgatttataagcatggaaatcccctgagtgaaacaacgaattgctgtgtgtagtctttgcccatctcccacgatgggcttttttttaacatttttccgcttcgctacctcgcccctcactctttccaataatgttgcacaagatactgtgactctcttcaagccgtcagcaggctgataatgttatttatattttattgtttatttcatgcagccattacacgatgaacgcttatgaactccaggcactccgccatatttttgccatgactattgatgaatgcgcgacctggattgcccagaccggtgacagtgaaagctggcgtcagtgggaaaatggcaagtgtgccattcctgatcgtgtagtcgagcaactgttggctatgcgtcagcaaagaaaaaaacatcttcatgccatcatagagaaaataaataaccgcatcggcaacaacaccatgcgttttttccccgacttaaccgcatttcaacgagtctaccctgatggcaattttattgactggaagatctatcaaagcgtagctgctgaattatatgcacacgatctggagcggctttgttaatttttccacagaaaggaattgtcgttgttacaacaataatgaacggatgctgacacaacatcgcttcactttttaaagcacctttgctaagtagaacctatgaaaaatccctatttccctaccgcacttgggttgtattttaattacctggtgcatggtatgggcgtccttttgatgagcctgaatatggccagcctggagacactttggcagactaatgccgcgggtgtcagcatagttatcagtagcctgggcattggtcgattaagtgtcttgctttttgcaggattattatccgatcgctttggtcgccgcccttttatcatgctcgggatgtgctgctatatggccttcttttttggcatcctgcagaccaataacatcattatcgcttatgtttttggctttctggcgggaatggcaaacagttttctcgatgcaggcacttatcccagtttgatggaagcttttccacgcagtcctgggacagccaatattttaattaaagcatttgtttccagcggacaatttttattaccgctaatcattagcctgttagtgtgggctgaactgtggttcggttggtcctttatgattgctgcaggcattatgtttattaacgctctgtttttataccgttgtacgttcccaccccatccgggtcgtcgcttacctgtcataaagaaaaccaccagctctacggaacatcgctgtagtattatcgatttagccagttataccttatatggctatatcagtatggcaacgttttatctggttagccagtggctggcacagtacggacaatttgttgcaggcatgagttacactatgagcatcaaactactcagtatctacaccgtgggtagcctgctttgtgtatttattaccgctccactcattcgtaataccgttcgcccaacaacattactgatgctgtacacctttatcagttttattgctctgtttaccgtctgcctgcatcccacattttatgtggtgataatatttgcttttgtcattggttttacctctgctggaggtgttgtgcaaattggcctgacgttaatggctgaacgtttcccttacgctaaaggtaaagctacagggatctattacagtgcgggcagtattgcgacctttactattccgttgattacggctcatctgtcccaaagaagtattgccgatattatgtggttcgataccgccatcgctgccatcggttttttactggcactgtttatcggcttacgcagccgcaaaaaaacgcggcatcacagcctaaaggaaaatgtcgctccgggtgggtaatgcaatattcttttcaggtcatgcaagatcttacggataaataactctttctgcgctaactaaggaaaatcgcgatcaaaaacaaactatgacatgcaatattcctggaaacataaactttatgccatgtacccagggaaaatcatcttcagtatagtaattatgtaaaccgtcggagaacaatacgtacggtaacgaaattatctttcagcaaggagctgtgaaaatgtctcaaaataaggctttcagcacgccatttatcctggctgttctttgtatttacttcagctacttcctgcacggcattagtgttattacgcttgcccaaaatatgagttctctggcggaaaagttttccactgacaacgcgggcattgcctacttaatttccggtatcggtttggggcgattgatcagtattttattcttcggtgtgatctccgataagtttggtcgtcgggcggtgatattaatggcagtaataatgtatctgctattcttctttggtattcccgcttgcccgaatttaactctcgcctacggtctggcagtgtgcgtaggtatcgctaacagtgcgctggatacgggtggctaccccgcgctcatggaatgctttccgaaagcctctggtagcgcggtcatactggttaaagcgatggtgagttttgggcaaatgttctacccaatgctggtgagctatatgttgctcaataatatctggtacggctatgggctgattattccgggtattctatttgtactgatcacgctgatgctgttgaaaagcaaattccccagccagttggtgggcgccagcgtaactaatgaattaccgcaaatgaacagcaaaccgttagtctggctggaaggtgttagtagcgtactgttcggtgtagccgcattcagcaccttttatgtgattgtggtgtggatgcccaaatatgcgatggcttttgctggtatgagtgaagctgaggcattaaaaaccatctcttattacagtatgggcagcttggtctgtgtctttatttttgccgcactactgaaaaaaatggtccggcccatctgggctaatgtatttaactctgcactggcaacaataacagcagccattatctacctgtacccttctccactggtgtgcaatgccggagcctttgttatcggtttcagtgcagctggcggcattttacagctcggcgttagcgtcatgagtgagttttttcccaaaagcaaagccaaagtcaccagtatttatatgatgatgggtggactggctaactttgttattccactgattaccggttatctgagcaacatcggcctgcaatatatcattgttctcgattttactttcgcgctgctggccctgattaccgcaattattgtttttatccgctattaccgcgttttcattattcctgaaaatgatgtgcggtttggcgagcgtaaattttgcacccggttaaacacaattaagcatagaggttaaaggagttaattatggatgttaccgcaaaatacgaattgattgggttgatggcctatcctatccgccacagtttaagccccgaaatgcagaataaagccttagaaaaagcgggattgccatttacctatatggccttcgaagtggataacgatagctttcctggagcaattgaaggattaaaagccctcaaaatgcgcggaactggtgtaagcatgccgaacaaacaactggcgtgtgaatatgttgatgaattaacaccagctgccaaactggtgggggccatcaacaccatcgttaatgatgatggctatctgcgtggctataacaccgacggcacgggccatattcgcgccattaaagagagcggttttgatatcaaaggcaaaacgatggtgctgttaggggccggtggtgccagtacggcaattggcgcgcagggggcaattgaaggtttaaaagaaattaaactctttaaccgtcgggatgagttcttcgataaagccctcgccttcgcgcagcgggttaatgaaaacaccgattgtgtcgtcacggtcaccgatctcgccgatcagcaagcctttgctgaagccctggcttccgccgacattttaaccaatggcacaaaagtgggtatgaaaccccttgagaatgaaagtttggttaatgatatcagtctgttacatccgggacttctggtcactgaatgcgtgtataacccgcatatgacgaagttattgcagcaggcgcaacaagctggttgcaaaacgattgatggatacggcatgttgttgtggcaaggggctgaacagttcacattatggactggcaaagatttccctctggaatatgttaaacaggtcatggggttcggtgcctgacaggctgaccgcgtgcagaaagggtaaaaaatgaaaaccgtaactgtaaaagatctcgtcattggtacgggcgcacctaaaatcatcgtcagcctgatggcgaaagatatcgccagcgtgaaatccgaagctctcgcctatcgtgaagcggactttgatattctggaatggcgtgtggaccactatgccgacctctccaatgtggagtctgtcatggcggcagcaaaaattctccgtgagaccatgccagaaaaaccgctgctgtttaccttccgcagtgccaaagaaggcggcgagcaggcgatttccaccgaggcttatattgcactcaatcgtgcagccatcgacagcggcctggttgatatgatcgatctggagttatttaccggtgatgatcaggttaaagaaaccgtcgcctacgcccacgcgcatgatgtgaaagtagtcatgtccaaccatgacttccataaaacgccggaagccgaagaaatcattgcccgtctgcgcaaaatgcaatccttcgacgccgatattcctaagattgcgctgatgccgcaaagtaccagcgatgtgctgacgttgcttgccgcgaccctggagatgcaggagcagtatgccgatcgtccaattatcacgatgagcatggcaaaaactggcgtaatttctcgtctggctggtgaagtatttggcagcgcggcaacttttggtgcggtaaaaaaagcgtctgcgccagggcaaatcagcgtaaatgatttgcgcacggtattaactattttacaccaggcataagcaataatatttcggcgggaacaccctccccgccgaactaaaaaatatattcaatcgtatttaataaaaatatttcgtgagtctctgtgcgctaattctccatttggcgtagggaaaatcacatctgaatcaggaattaacaatgaaacctgtaaaaccacctcgtattaatggacgagtgccggtcctgagcgcacaggaagcggtgaattatattcccgacgaagcaacactttgtgtgttaggcgctggcggcggtattctggaagccaccacgttaattactgctcttgctgataaatataaacagactcaaacaccacgtaatttaagcattattagtccaacagggcttggcgatcgcgccgaccgtggtattagtcctctggcgcaagaaggtctggtgaaatgggcattatgtggtcactggggacaaagcccgcgtatttctgaactcgcagaacaaaataaaattattgcttataactacccacaaggtgtacttacacaaaccttacgcgccgccgcagcccaccagcctggtattattagtgatattggcatcgggacatttgtcgatccacgccagcaaggcggcaaactgaatgaagtcactaaagaagacctgattaaactggtcgagtttgataacaaagaatatctctattacaaagcgattgcgccagatattgccttcattcgcgctaccacctgcgacagtgaaggctacgccacttttgaagatgaggtgatgtatctcgacgcattggttattgcccaggcggtgcacaataacggcggtattgtgatgatgcaggtgcagaaaatggttaagaaagccacgctgcatcctaaatctgtccgtattccgggttatctggtggatattgtggtggtcgatccggatcaaacccaactgtatggcggtgcaccggttaaccgctttatttctggtgacttcacccttgatgacagtaccaaacttagcctgcccctaaaccaacgtaaattagttgcgcggcgcgcattattcgaaatgcgtaaaggcgcggtggggaatgtcggcgtcggtattgctgacggcattggcctggtcgcccgagaagaaggttgtgctgatgactttattctgacggtagaaacaggtccgattggcggaattactagtcaggggatcgcctttggcgcgaacgtgaatacccgtgccattctggatatgacgtcccagtttgatttttatcacggtggcggtctggatgtttgttatttgagttttgctgaagtcgaccagcacggtaacgtcggcgtgcataaattcaatggtaaaatcatgggcaccggtggatttattgatatcagtgccactagcaagaaaatcattttctgcggcacattaactgcgggcagtttaaaaacagaaattaccgacggcaaattaaatatcgtccaggaaggacgggtgaagaaatttattcgggaactaccggaaattactttcagcggaaaaatcgctctcgagcgagggctggatgttcgttatatcactgagcgcgcagtattcacgctgaaagaagacggcctgcatttaatcgaaatcgcccctggcgtcgatttacaaaaagatattctcgacaaaatggatttcaccccagtgattagcccagaactcaaactgatggacgaaagattatttatcgatgcggcgatgggttttgtcctgcctgaagcggctcattaacaggagtataatgatggatttttctttaactgaagaacaagaactgctgctggccagtattcgcgaactgattacgactaactttccggaagagtatttccgcacctgcgatcaaaacgggacatatccgcgtgagtttatgcgggcgctggcggataacggtatttccatgcttggcgtgccggaagaatttggtggtatccctgcggattacgtcacccaaatgctggcgctgatggaagtgagtaaatgcggtgctccggcatttttaattaccaacggtcaatgtattcacagtatgcgccgtttcggttctgcagagcagctacgtaaaacggcagagagcaccctggaaacgggtgatcccgcctatgccctggcgttgacggaaccaggtgctggcagtgataacaacagtgccactaccacttacacgcgtaaaaacggcaaggtctacatcaacggacaaaaaacctttattaccggtgcgaaagagtacccgtatatgctggtgctggcgcgcgatccgcaaccgaaagatcccaaaaaagccttcaccctgtggtgggtcgactccagtaagcccggcattaagattaacccgctgcataaaatcggctggcatatgctcagcacctgcgaagtctatctcgacaacgtggaggttgaagagagcgacatggtgggcgaagaaggaatgggtttcctcaatgtgatgtacaactttgagatggagcgcctgatcaacgccgcgcgcagcaccggctttgccgaatgcgcctttgaagatgccgcccgctatgccaaccaacgtatcgcttttggtaagcccattggtcataaccagatgatccaggaaaaactggcgctgatggcgattaagatcgacaacatgcgcaacatggtgctgaaagtggcatggcaagccgatcagcatcagagtctgcgcaccagcgcggcgctggcaaaactgtactgtgcacgtaccgcaatggaagtcattgatgatgcgattcaaatcatgggcggtctgggctataccgatgaggcgcgcgtctcccgcttctggcgtgatgtccgttgtgaacgtatcggcggcggtacagacgaaattatgatttacgtagcaggtcggcagatcctgaaagactatcagaacaaataatctgcaggcggcgcagcttcttaacaaactgcgccgccagatttatccaacaagacttaccggttgaggaaattcagataggatttcttgttccgcaaaacagtttttaaattgtctacggtaatcgctggggctacaaccgacatggcgcaaaaacagtttggcaaagtgatcgacattttcataacccacacgccaggagatctctgcctgacttaattcagtattagtgagactccattttgcttccgtcatacgccgttgaataacatagttaataggggaaatacgatactctttggtaaattcatggcaaatataactgacgctggcacgaaattttttgcttaactgttctaaagtgattttttcgcgataattattattcagatagaaaagaatatcttttatcagaacatcttttttaatatacccctgctcgctacgataagcatttttaaaattttcgtagtaaagaatggctaacgtataggcaaatgcatcccataagctagatgtttggctatttttactttgcggcaaaatcacacttagctcattaaataaggtttttatgacttcttttccctgccccgcggcaattaccggacaagaatgcggttgcagtagctgattttcctcagccccctgaaactgaaagccgtacagcgcacaggtacacgtcgttgccggatcgttaacgtcagaggccaccgcatgcagcctgccgcgttctatcaccacaatgtcatccgcatgtgcgacatataagctagaatcgatggtaaaccttgcaacccctttcttgacgtaaatcaactcggtttcattgtcatgaacgtgatgtccggactcccattttggatcatcgctaaatgcaaaacgactaagccgtggcgttttaccggcgacaaacagcgtttcactggcgttatcaaaacagcgttgatacatgacaacctccctattccatgagcaagcaaaaacaatatatgccggataaaatacggcgtgtattgcggttatacaaccgcgtttagcgagagctaaacaagattatttacactgaatgcaagattgtacggtcatggaataactatattgccgcaaattgcacttttgttttagcgatcgcattttttttgcaagattgttggcaaggaaaacagcttgctccgtcgaaaaccccgcaccgctatcgcacactattttcaggccatttttaccttccatcggagatggttccgtatgcgactcacaggagaaatcatgaaaataataacctgctttaagctggtgcctgaagaacaggacattgttgtcactccagaatacaccctgaatttcgacaatgccgacgccaaaatcagccagttcgatctcaatgccattgaagctgcaagccagctcgcaacagatgacgatgagatagccgcgctgaccgttggcggcagtttgttgcagaacagcaaagtgcgcaaagacgtgctatcccgcgggccgcacagcctgtatttggtgcaggatgcgcaacttgaacatgcactgcctctcgataccgcaaaagcgctggcggcagcaattgaaaagatcggcttcgatttactgatctttggtgaaggttccggcgacctttatgcccagcaggttggcttgctggtcggagaaattctgcaacttccggtgattaatgcagtgagtgctattcagcgtcagggcaatacactggtgattgaacgcacgcttgaagatgatgttgaagttattgaactctctgttccagccgtgctctgcgtcacctccgatattaacgtgccacgcattcctagcatgaaagccattctcggcgcgggtaaaaaaccggtaaatcagtggcaggcaagtgatattgactggagccagagcgcgccacttgctgaactggtcggcattcgcgtaccgccgcaaacagaacgtaagcacatcattatcgataacgatagcccggaggccattgccgagctggcggaacatctgaagaaagccctgaactgaagcctacggagaagaaacgatgagtcaattaaacagcgtctgggtctttagcgataatcctgaacgttatgctgaactgtttggcggcgctcagcaatggggccaacaggtgtatgccattgtacaaaataccgaccaggcgcaggcagttatgccttatggtccaaaatgtctttatgttcttgcgcaaaacgacgcgctgcaacgcactgaaaattacgccgaaagcattgctgccctgctgaaagataaacaccccgctatgttgctgttggccgcgacgaaacgtggtaaagcgctggcagcacggttaagtgtgcaactgaatgcggcgctggtgaacgatgccacggcggtggatattgtcgatggtcacatttgcgccgaacaccggatgtatggcgggttagcgttcgctcaggaaaagatcaacagcccgctggcgatcattacccttgcacccggtgttcaggaaccgtgcaccagtgatacctctcatcagtgcccgacagaaacggtaccttatgttgctccgcgtcatgaaattctctgtcgcgaacgccgtgcgaaagccgcaagcagcgtggacctgagcaaagcaaaacgtgtggttggcgtcggtcgtggactggcggcgcaggatgacctaaaaatggtccacgaactggcggcggtgctgaatgctgaagtcggctgtagtcgtccaattgccgaaggcgagaactggatggagcgtgaacgttatatcggtgtctccggcgtgttgctgaaatccgatctctacctgacgctggggatctccgggcagatccagcatatggttggcggcaacggcgcaaaagtgattgtcgccatcaataaagataaaaatgcgccaatcttcaactatgccgactacggtctggtgggcgatatctacaaagtcgtccctgccctgattagccagttgagccgctaattcccctttcaaccacatctcccgctgtaaacgcagcgggaagggagcataacgcatgagcgatgacaaatttgatgccattgtggtcggtgcgggcgttgctggtagcgttgccgcactggtcatggcacgagccgggctggatgtcctggtgatagaacgcggcgacagtgccggatgtaaaaacatgaccggcgggcgtctttatgcccacacacttgaagcaatcattccaggctttgcagtaagtgcgccggtagaacgcaaggtcacacgcgagaaaatctccttcttaaccgaagaaagcgccgttaccctcgattttcaccgcgagcagccagatgttccgcaacacgcatcttataccgtattgcgtaatcgtctggacccgtggttgatggaacaagccgagcaggcgggcgcgcagtttatcccaggcgttcgcgtcgacgcgctggttcgtgaaggaaacaaggtcactggcgtgcaggctggggatgatattctcgaagcgaatgtggtgattctggctgatggcgttaacagcatgcttggccgcagcctgggaatggttcccgcttccgatccgcatcattacgctgttggtgttaaagaggttattggcctcacaccagaacagatcaacgatcgctttaatattacgggcgaggaaggtgccgcctggctgtttgccggttccccttctgacggcctgatgggcgggggatttctctataccaacaaggattccatatccttggggctggtttgtggattgggtgatatcgcccatgcgcaaaaaagcgtgccgcaaatgctggaagattttaaacaacaccccgccattcgcccgctgattagcggcggcaaactgcttgaatattccgcgcatatggtgccggaaggcggtctggcaatggtgccgcaactggttaacgagggcgtgatgatcgttggtgacgccgcaggcttctgcctgaatttgggttttacggtccgcggcatggatttagccattgcaagcgctcaggctgccgccacaacggtgatcgccgccaaagaacgcgcggatttctccgccagcagtctggcgcaatacaaacgtgagctggaacaaagctgcgtcatgcgtgatatgcagcattttcgcaagatcccggcgctgatggaaaacccgcgcctgtttagccaatacccacgaatggtagccgacatcatgaacgagatgttcaccatcgacggcaaaccaaaccagccggtacgaaaaatgatcatgggacatgcgaagaaaattgggctgatcaacttgctgaaagatggcattaagggagcaaccgcgctatgagccagaacgctacggttaacgtcgacatcaaattaggcgtcaataaattccatgttgatgagggccacccgcatatcattctggcggaaaatcccgatatcaatgaattccataaattaatgaaagcctgccctgccggactttataagcaggatgacgcaggaaacattcattttgattccgccggttgtctggagtgcggcacctgtcgggtgctgtgcggtaacactattctcgaacagtggcaatatcccgcaggcaccttcggtattgattttcgctacggctaatcatgcatcccacaggcccgcatctcgggcctgatgttctgtttcgagagtccaacatgaaagtgacattaacgtttaacgaacaacgtcgtgcggcgtatcgtcagcaagggttatggggcgatgctagcctggccgattactggcagcagaccgctcgtgcgatgccagacaaaattgccgtggtcgataatcatggtgcaagctacacctatagcgcgctcgatcacgccgcgagctgtctggcaaactggatgttagcgaagggtattgaaagtggcgatcgcatcgcatttcaactgcctggctggtgtgaatttaccgttatctatcttgcctgcctgaaaatcggtgcagtttccgtgccgctgttgccttcctggcgggaagcagaactggtgtgggtgctcaataagtgtcaggcaaaaatgttctttgcaccgacgttgtttaaacaaacgcgtccggtagatttaatcctgccgctgcaaaatcagcttccacaactacaacaaattgtcggcgtggacaaactggctcccgccacctcttccctcagtttaagtcagattatcgccgacaataccagtctgaccacggcgataacgacccacggcgatgaattagctgcggtgctgtttacctccggaaccgagggtctgccaaagggcgtgatgctaacgcataacaatattctcgccagtgagcgggcttattgcgcgcgactgaatctgacctggcaggatgtctttatgatgcctgcgccacttggtcacgcaacgggctttctgcatggcgtaacggcaccattcttaattggcgctcgcagcgtgttgttagatattttcactcctgatgcgtgtctcgcgctgcttgagcagcagcgttgcacctgtatgctcggcgcaacgccgtttgtctatgatcttttgaatgtactagagaaacaacccgcggaccttagtgcgctgcgtttctttctttgcggcggaaccacaatccccaaaaaagtggcgcgtgaatgccagcagcgcggcattaaattattaagtgtttatggttccacagaaagtagcccgcatgcggtggtgaatctcgatgatcctttgagccgctttatgcacaccgatggttacgctgccgcaggtgtagagattaaagtggtcgatgacgcacgcaagaccttaccgccaggttgcgaaggtgaagaagccagccgtggccccaatgtgtttatggggtattttgatgaacctgaattaaccgcccgtgccctggatgaagaaggctggtattacagcggcgatctctgccgtatggatgaggctggctatataaaaattaccggacgcaaaaaagatattattgtccgcggcggcgaaaatattagcagccgtgaagtggaagatattttattgcagcatcctaaaattcacgatgcctgtgtggttgcaatgtccgatgaacgtttaggtgaacgaagttgcgcttatgtcgtgctgaaagcgccgcatcatagtttaagcctggaagaggtagtggctttttttagccgtaaacgggtcgcaaaatataaatatcctgaacatatcgtggtaatcgaaaaactaccgcgaactaccagtggtaaaatacaaaagtttttgttaagaaaagatattatgcggcgtttaacgcaggatgtctgtgaagagattgaataagtttcatcttcggggatcacataaccccggcgactaaacgccgccggggatttattttatttcttcagttcagccaggcttaaccaggtttgcaccacggtgtccgggttcagagacaggctatcgatcccctcttccatcaaccatgcggcaaagtcttcgtggtcggacggaccctgaccgcaaatcccgacatatttgccctgtttcttcgcggcacggatagccatgctcagcagtgctttcaccgcatcgttgcgctcatcgaacaattcagacaccacgccggagtcacggtccagaccgagcgccagctgcgtcatatcgttactgccaatactgaagccgtcgaaatattcgaggaactgctcggccagcaaggcgttggacgggatttcacacatcatgatgattttcagcccgttctcgccacgtttcagcccctgacgcgccagttcttcaaccaccgctttcgcctgatctacggtacgcacgaacgggatcatgatctcaacgttggtcagtcccatgtcgttgcgcacacgtttcactgcttcacactccagcgcgaaacagtcgcggaagctgtcggaaacatagcggcccgcgccacggaagccgagcatcgggttctcttcatctggctcgtaacgctcaccaccgaccaggttggcatattcgttgcttttaaaatcagagagacggacaatgacgcgcttcggataaaacgcggcacccagcgtcgcgatcccttcagtcagacgaccaacgtaaaattcacgcggagaatcaaaacctttcatcatctcgcggatttcgttttgcaactgcggttcctgatcgtcaaactcaagcagtgcgcgtgggtggacgccaatcatacggttgatgataaattccagacgcgcaaggcccacgccttcgttcggtaggcaggcgaagtcgaaagcacggtccgggttaccgacgttcatcatcactttcaacggcagatccggcatcgtttctacgctggagcttttcacgctaaattccagcaactccgcatagacgtaaccggtatcaccttcggcacaagaaacagtgacgttctcaccgtctttcatccgttctgttgcatctccacagcccactaccgccggaatgcccagttcacgagcgatgatcgccgcgtgacaggtacgaccgccacggttggtgacgatggcagatgctttcttcatgatcggttcccagtccgggtcggtcatgtcagtaaccagcacgtcgccaggttcgatgcggttcatttcgctgatgtcatggatgactttcaccggacccgcaccgatgcgatgaccgatagcacggccttcggcgataatcttaccctgactatgcagcgtataacgctccatgacctgaccgcgactgcgcacggtttccggacgcgcctgcacaatgaacagtttaccggtgtggccatctttcgcccactcaatatccatcgggcgaccgtagtgtttctcaatttgtacggcctgttttgccagttcctgcacttcttcgttggtcaggctgaagatgtcacgctgttcctgcggtacgtcttcgattttaacctgcttgccgtgctcctgggtcggcgcgtaaaccatgcggatttttttgctccccatggtgcggcgcacgatagccgggcgattcgccgccagtgtcggtttatgcacgtaaaactcatccgggttaaccgcaccctgcacgaccatctcaccaaggccccatgcggaagtgataaacaccacctggtcaaagccggattcggtatcaatggagaacatcacgccagaacttgcgaggtcagagcgcaccatccgttgaacaccggcggagagcgccacaccacggtgatcgtaaccctggtgcacacgataagagatggcgcgatcgttaaacagagaagcaaatacatgtttcactgccacgagaacggcgtcaaaaccctgaacgttgaggaaggtttcctgctgaccggcaaaagaagcgtccggcatatcttctgcggtggcggaggagcgcaccgcaaaagaggcgttttcgtcatcggcggaaagctgtgcataggcttcgcggatggcgttttccagctcaggctggaagggagtgtcgataatccactggcggatttgcgcgcccgctttcgcaagctgagtaacatcgtcaatatccgttttatccagcagttcataaatgcgctggtttacgccgctttggtccagaaactggttaaacgcgtcggcggttgtggcgaaaccattcggaacggaaacacccattccggaaagattagtaatcatttcacccagggaggcatttttgcccccaaccctgtctacatcattcatgccgagttggttataccaaagcaccagcggactgctgccattgttggacatcgaacaatccttttgtgataaatgaacggtttgagaaacacatttctgcgcatttatctttgcatatttaaccggatgaaaaaaacggtgaatcgttcaagcaaatatatttttttactttttaagactgatcccagcgttgcgcaaatctgctctcttcgacaatttccacataaaccatcggtataaacgaaaccataaaaatgaaatgctgttttcataaaaaataaaattgaaggttcattttataaaccagacataacgttctacgcttctgtgcgtttttaatttatgctttcatagaattatgtctgcatcacgggaagaacaaaatggataatgctgttgatcgccacgttttttatatttctgatggtacggcaataactgcggaggtattaggacacgcagtaatgagtcaatttcccgtcactatcagcagcatcacgctgccgtttgtcgaaaatgagagccgtgcacgggcagtgaaggatcagattgacgcaatttatcaccagacaggcgtgcgcccgctggtcttctactccatcgtgttgccggagattcgcgccatcatcttgcaaagtgaaggcttttgccaggatatcgttcaggcgctggttgccccgctacaacaagagatgaaactggatccaacgccgattgctcatcgtacccatggccttaaccctaataatctcaataaatatgatgcgcgcattgcggcgattgattacaccctcgcccacgatgacggcattagcttgcgcaatctggaccaggctcaggtgatcctgctcggtgtttctcgctgtggtaaaacccccaccagtctgtatctggcaatgcagtttggtatccgcgcggcaaactacccctttattgccgacgatatggataatctggtgctacccgcgagcctcaaaccgcttcagcataaattgttcggcctgactatcgacccggaacgtctggcggcgattcgcgaggaacgtcgggagaacagtcgctatgccagccttcgtcagtgcaggatggaagtcgcggaagtggaagccttgtaccgtaaaaatcagatcccgtggattaacagtaccaattatagcgtagaagagattgccaccaagatcctcgatatcatgggccttagtcgccgaatgtactaaagaactagtgcattagcttatttttttgttatcatgctaaccacccggcgaggtgtgacacacctcgcacttgaaatcagcagcgattggtttatcgtgatgcgcatcacttcccggcagtcctgccgtagaagcaacaaatttctgagacttgtaatgaacagaactgacgaactccgtactgcgcgtattgagagcctggtaacgcccgccgaactcgcgctacggtatcccgtaacgcctggcgtcgccacccatgtcaccgactcccgccgcagaattgaaaaaatactgaatggtgaagataagcgactgttggtcattattggcccctgcagcatccacgatctcaccgctgcaatggagtacgccacccgtctgcagagcctgcgcaaccagtaccagagtcggctggaaatcgtaatgcgcacctattttgaaaaaccacgaactgttgtcggctggaaaggactaatctccgatccagatttaaacggcagctatcgggtaaatcacggtctggagctggcgcgcaaattacttttacaggtaaatgagctgggcgtcccaaccgcgaccgagttcctcgatatggtgaccggtcagtttattgctgatttaatcagttggggcgcgattggcgcacgtactaccgaaagtcagatccaccgcgaaatggctagcgcactctcctgtccggtaggttttaaaaatggtaccgatggcaatacgcggattgctgtggatgctatccgcgcagcccgcgccagccatatgttcctcagcccagacaaaaatggtcagatgaccatctatcagaccagcggcaacccgtatggccacattattatgcgtggcggcaaaaaaccgaattatcatgccgatgatatcgccgcagcctgcgatacgctgcacgagtttgatttacctgaacatctggtggtggatttcagccacggtaactgccagaagcagcaccgtcgccagttagaagtttgtgaggatatttgtcagcaaatccgcaatggctctacggcgattgctggaattatggcggaaagtttcctgcgcgaaggaacgcaaaaaatcgtcggcagtcagccgctcacttacggtcaatccattaccgacccgtgtctgggctgggaggataccgaacgcctggtcgaaaaactcgcctctgcggtagatacccgcttctgaatgcgtgcccattcctgacggaatgggcatttctgcgcaacttgttgtcttctcaacaaattactgcttgctctggtcagccataatattgataataagaatcattgttatatcaattattattaatttttatgcgttatacggatagcagaaaactcacgcctgaaacggatgccaatcacaagaccgcttccccgcagcctattcggcgaatttccagccagacactgttaggtccggatggcaaactgattatcgatcatgacgggcaagaatatctgctccgtaaaactcaggctggcaagctgctgttgaccaagtaacctttaactgctgcagctgacttccagccgtttaccccagtcaggtggacgactgacatagtcatcatctctgtcgctgaaaggatttcgcaacgcctcatgcaggcggtgcaattccgtcatatcacccttttctgccgcttcaatcgcccgttgcgccaaccagttgcgcaataccagagcggggttaacgctttgcatcagttgctgacgctcactatcgctaacctcgtcttgttgcaaacgcccccgataacgggcaaaccagtcatcaaatgccgcacgatcaataaactcatcacgtagcggactcgccgcgctgtgctgctcggtcagactcagcatgcggaatgtgcgggtataatcgctgcgctctcgcgccatcagactgaataattcattcagtagcgcgttatcctctttttgctccgtcatgaagcccagtttctgccgcatccgttctccataatgcgtcaacaaaacctgctgatagctgtccagggcctcattcagggcatctacggcaacaaatgggctcaatgtctgcgccagacgctgtaaattccacaacgcgacggcaggttgattatcaaagctgtaacgcccttgatgatcgctgtgattacaaataaaaccgggttcgtaatcatcaagaaaaccaaacggcccgtaatcaagcgtcagccccagcaggctcatgttgtcggtattcatcaccccatgagcaaagccgaccgtctgccattgggcaattaagctcgcggtacgtgcgacaacatcgctaaaccagagacggtatttgtcctcatcatctgcaagatgactccagtaatgacgaatagcaaagtcagctaactgacgaaccttttcgctctcgcggcggtagtaaaaatgttcgaaatgaccaaagcgcagatgacttggtgccacacgcatcagcatcgcgcctggctccgccgtttcccgatacactgggctatcgctggtgacgatacttaacgcgcgggtcgtcggaatgcccagataatgcatcgcctcactggcgagactttctcgtatcgtgctacgtaaaaccgcccgtccatcacccattcggctataaggcgtcaggccagcacctttcagatgccagtccattgtagtgccatcagcaagcagttgttcgccgagtaaaatgccgcgcccatcacccagttggcccgcccagacgccgaactgatgaccactgtaaacctgcgccagtggactcataccaggcagtagggcttcgccgccccagacacctgcgccatttttaaacaggctgcttggaatactcagcgtgttagccagttcggtattatgccaaatcagccgggcattatttaaaggcgtaggggaaagtgctgtataggtttctggcaattcatcgcgccagcgggtaacaaaagacagggtcatagatcctcctgtttgatagtgtagacggttactctcgtcttaaacaccagcaaacagaagggttatcgctgaaccaacgtcgttatctgatttatgggaacggcaggccacaggcatccctggagagcatggaaatcgaagggggtaatctgtgccaatatttctgccgtatcaatgcctcccgcaatgatgcaattgcaacaaggggaaatttgcgcctggatcgcacgaataaacggttcgaaggagcggtgcgtgatttgttgctgaataaaacttttatccagcatgacgcgggtgaaaagaccatcaaaaaccgctttcattgtgctattgcctgctcccaaattacctaacacaaggggatacacttggcttaaggataaaagaccgcgattatcttttccttcattgagatgcgggtaattctcattaatcaacagttcaataaacggatattttaatagttcgcctgcgtaattatccctctctaataataatgtagccacttgtggcgttaaattaagccaggcaaagagtttatgttgaataaaaaaatgttggcaactttttagtaattccaactgctcactaaataattgccaatgttgctcctcggtaagttgcgctataacccgactcgtcgggatacgaaccgtaccatcttcactggagaaatgggtaattaactcaacgccgacaaggacttgctggttgtctcttatcggcaggaaatagcaatcagaatgataaagattctccaaaaaaatcttcatggtaaccgtccctctcgaaggatgtttttcagtatccggctaaaagggatgaggccataagacataacaattacagaaggagtaactttcatttgttccatgttaaccactttttcaggggtcctttttttagattatcctgattataaacgaataatccatttacggaatttttgtctgcaaaatactactgtattcaggagtaaatggacggcgatgtatcatcgccgtccatttttcgacatattagattcgtctcgcctgccagaaatttttctgccaatagacattatcaagactggaacgcatcactcccttgctggtagaggcgtggataaattggttgttggtatcgtaaatacctacatgcaaaccattttgtccggaccccgttttgaaaaagaccaggtcacctggcagcaactcgtctttatcaatttgcgtgccaatagaggcttgttgtttggtttcacggggcagctgcaaatcgaaacgatcgcgcatcgtcacaaccacaaatccgctacagtccacaccgcgccgcgtcatgccaccataacgatacggcgtgccatgccagctttgtagctggtcgttcaaaccggcaataacggtaatgctatcagaaagtctggcatttggcggcggtgctttatggtggctacacccggccagaagcagtgctgtgatcaaaataaggcagaaacgcattccgtacggttcctctgttttttattcttgcattaatttagcgtcgtaattacccgattttcaagatactaatgaaatcagatggtgctaatcagcattctgtgaccttcgatatccagacggcgaaaattcatcccataggcctgcgccagatttggcggcgtgagcacctcttccctgcgtccactggccagcatttttccaccttttagcaaccacgcccgatgcgcatgacgcaatgtgtggttgagatcgtgactgctcatcacaatcgccagtccttgctgacacagcgcgctcagaattttgtctaacgcactttgttgcgcaacatcaagactgttcatcggctcatcaagaagcagcaattggcctgcgggattggcttgtggtgtgatttgcaacaccaccgcagcaagacgtacgcgttgccattcaccgccggaaagttgattggtgctacgtccgagtttgtcatcaagagccagcgcccctgcgacatcattcagtagttcggtacgcgttttatcgtgctgatgcagtgtcaggtagtgccagaccggcgttgcaaacggcggcgtctgctgttgactaagataggcgcgatgcagcgcgagttttgttgcggaccatgcttccagtggttgccccgcgaactgaatgcttcccttaccgctggtcattccggccattcgcgccagtaaggtactcttacccgcgccattcggccccaccaggtgcaggatctccccagcccgaacctcgccagaaagcggccccaggcgggtagattccgcaacatcttgtaactgcatcacaatagacattattttgccaacgccagtttaatgctttccatcacaatgggatcttccggcgtcatatccggggaaaaacgctggatgacttttccgtccctgccaaccaggaatttttcaaaattccataaaatatcatccgggtacagcggtgcacggcctttgctgaccatacgggcatagaatccgctctcttccggcgcgactgcggtcggcgctgcggcaatcaatttttgatacagcggatggcgtccttcgccattaacttcaatcttactgaacatcgggaacgtcaccccccatgtggtggtacagtaagttttaatctcttcatcgctgcccggttcttgttccagaaactggttgcacgggaatcccagcaccataaaacctcgatcgacccaggctttctgaatattctccaactgctcatattgcggcgttaagccacacttactggcgacattgacaatcaacagcacattaccggcgaacttctccagcgtggtcacttcaccgtcgatatctttcactacggtcgtcagaatggaatcttgcatcgtttctcctgggtgtggtcagtaaaaatcttagcttttaatcatagaccgtctttttgcggttaacgtcctgcttttaacaataaccagataaacaccggcgcacctaacgttgcggtgaccacgccaataggcagctctgcggcagctaatgccaggcgcgctacaatatcggccagcagcaatgcgctcgcccctgccagcgcgcagccgggaagtaatacgcgatgatcggttaaaccacacaaccggagaatatgggggatcaccagaccaataaagccgatagcacccgccagcgccacactgacgccaaccatccagccggtcgctgccaccagcacattgcgccagaaccacaggggtaaacccagttgccgcgcgctgatctcgccaagtgctaacatattcatcggcctggactgacaacagatccacaacaacacggggatcaatgccagcatcagccagctttgccgccagtctacgccgccaaaaccgcccatcatccagtacatcagctgacgcaaatcaacactggtggaaaagtagatagcccacgtcattagtgcgctacagataatccctaatgcaacgccagccagcaataaccgactggtgctaagatgacgacgggcgaaacgtaagagtattaaagtgatgataagcgcgccagcaatcgcacacagccctagcgcccagttggggagttgcccttgcccaagcaataccgcggcgataagccccacgcctgcgccgttagagacgccaagtagtccaggttctgccagaggattttcaaacaacgcctgcattacagcgccggatatagccagcgccgcaccaaccagcaatacagccagcgtacgtggcaggcgaatttgccagacgaacagttcgccacgaggagtaaaccagtcacctgggctgatccattgttcaccggcgcaaaggcttaagagaagcgccagcagcatcaaaacactcaggcataataaccagcgaatattttgtcgctgttgttggcgggcaagtgtcagcatggtatccgttctgctgaagtgtcatggcgttgattttacggtgactcttcgacagtgaaaagaaaaaaggccgcagagcggcctttttagttagatcagattactcgtctttggggctagcgttttcgacccggctttttaacttctgcccgggtctgaaggtcaccacgcgccgtgctgtaatgggaatatcctcgcccgttttcgggttacgtcccgggcgttgattcttatcacgcagatcgaagttaccaaaaccagagagtttcacctgttcgccgttttccagagcgcgacggatctcttcgaaaaacagttcaaccagttctttggcatcccgcttgctaagcccaagcttatcaaacagatattcactcatttcagcttttgtaagcgccataggttcaatccctcaaacttgcctggaatcgctcttttaatgcctctacacatttggcgacggtagcggcaatctcctcttcttcgagtgtacggctggtatcttgcaggatcaggcttatggcgaggctcttatacccctccgcaacacccttaccgcggtacacgtcaaataagtttacgccaactacctgatttacgccaactttcttacattcggataaaatatccgctgcgggaacgttttctgcgaccaccaccgcgatgtcacgacggttcgccgggaagcgagaaatctcgcgcgcctgaggcaccacgcggtctgcgagcttgttccactccagttcgaacaccagagtgcgaccgttaagatccagtttacgttccagttcaggatgaacaaccccaacaaaaccaatacgttcacctttcagataaatcgctgcggattgccccggatgcagtgccggattcgcttctgcacggaactcaacctcattcagtttaccggtcaggtcgagaacggattcaagatcgcctttcaaatcatagaaatcaacggtctcttttgccaggttccagtgctcttcgtaacggttaccgcaaatcacaccggctaacatcagatcctgacgaatgcccaacggtgcctgagtatctggtacgaaacgcagaccgctttcgaaaatgcgcacacggttctgctgacggttctggttgtacaccacggttgccagcaggccagtccacagagaaagacgcattgcactcatttcaacagagatcgggcttggcagcagtaaggcttcaacgcctggatggatcatctgctgcactttcggatcaacgaagctgtaggtgatcacttcctgatagcctttgtcgttgagcagcgttttcacgcgcttgaggctcaggtcagcttcacggtgagtacccataatcaggcttgcctgtaccggctcatccgggatgttgttgtagccgtaaacacgcgcgacttcttcaaccagatcttcttcaatctccatatcgaaacgccagctcggcgcaactgcctgccattcgtctttgccttcggtcacttcgcagccgagacgacgcagaatgtcagttacctgctcatccgcaatatgatggccgatcaggcgatccagtttgctacgacgtagagtgatggttgcacgcttcggcagcgttgcttcgttggtgatatcaattaccgggccagcctcaccaccgcagatgtcgatcagcagacgggtcgcacgttccatcgctttgtgctgcagtgccggatcaacgccacgctcataacggtgagacgcatcggtatgcaggccatgacgacgagcacgaccggtgatagacagcgggctaaagaacgcgcattccagcagcacgttttgtgtttcgtcattcacgccagagtgttcgccaccgaagatgccgcccatcgccagcgccttgttgtggtcggcgatgaccagagtgtcagcattcagcttcgcttcagtaccgtcgagcagcaccagcgtttcgccctctttcgccatccgcaccacaatgccgccttcaatgcgatctttatcgaaagcgtgcatcggctggcccagttcgagcagcacatagttggtgacgtcaacaactgcatcgatagaacggatcccgcaacgacgcagtttttctttcatccacagcggagttggcgctttaacgttaatgccttttaccacacggccaagataacgcgggcaggcttccggcgcttcgactgtaatcggcagcgtgtcgtcgatggtcgcaccaaccggaacgatttccggttgaaccagcggcagctggttcagcacggcaacgtcacgcgcaacaccaatgatgcctaagcagtcggcacggtttggcgtcacgctgatttcgatggtgttgtcatcaagtttcaggtattcacggatatcggtgccaatcggcgcatccgcaggcagttcgataatgccgctgtgatcgtcagaaatgcccagttcagagaaggagcacagcatcccttcagacggttcgccacgcagtttcgccgctttaattttgaaatcacccggcagaacagcaccaatggtcgctaccgctacacgcaggccctgacggcagtttggcgcaccgcagacgatgtccagcaggcgatcgccgccgacattcacttttgtcacacgcagtttgtcagcgttcggatgctgcgcacactcaaccacttcaccaacgaccacgccgtggaagctgccggcaaccggttctacaccgtcaacttccaggcccgccatagtgatttgatttgccagcgcatcgctatcaatcgccgggttcacccattcgcgtaaccacagttcactgaatttcataatctattcctgccttatttaaactgtttgaggaaacgcagatcgttttcgaagaaactacgcaggtcggtgacgccgtaacgcaacatagtcagacgctccatccccatcccgaaggcgaaaccagagtaaacttccgggtcgatgccaacgttacgcaacacgttcggatgcaccatcccgcagcccagcacttccagccatttaccgtttttacccatgacgtccacttctgcagaaggttcggtaaacgggaagtaggaaggacggaagcgaatctgcaaatcttcctcaaagaagttacgcaggaagtcgtgcagcgtgcctttcaggttggtaaagctgatgttggtatcaacaatcagaccttccatctgatggaacatcggcgtgtgagtctggtcgtagtcgttacgataaacacggccaggcgcgatgatacgaatcggtggctgctgggctttcatggtgcggatctgtacgccagaggtctgggtacgcagcaggcgggtagtgtcaaaccagaaagtgtcgtggtcagcgcgcgccgggtggtgaccaggaatgttcagagcatcgaagttatgataatcgtcttcgatttccggcccggttgccacggtaaagccaagctcaccgaagaaactttcgatacggtcgatggtacgggtaaccggatgcagaccgccgttttcaatgcgacgacctggcagagagacatcaatcgtttccgccgccagacgcgcattcagtgcagcgctttccagttccgctttacgcgcattcagcgcctgctgaacctgctctttcgcttcgttgataaccgcaccagctgccggacgctcttctggcggcagctcacgcagggtcgtcatctgaagggttaagtgcccttttttacccaaatattcgacgcgcacattatctaacgcggcaacatcactcgcctggctaatggccgccttcgcactggcaaccagttctgcgagatgactcatggttttcctcattgtgtcagtggtgacactggttcgttggacttagagcctatcccatcaggctattttacttgccattttggtcccgggctgtgctcgaaattctcacgtacttaaatacgctccggtttctccgcgctggccgtgtccagtctggctgcgacaattacacctgatgagacaggctttttatttttcaaaacgcgcatacaaaaaaagcctccactgggaggctttcaggcgctgttttccgtttctcttctcacgcgctagcctcctggattcaggtgctaaagtaaaaaaagaagcggaaaatagcagcattcattgcttgcgttaccttttggtactcttcaaaagacctttattgaaaaggctacggcgataaaagtcaatgttttgatggcgttgaaacgaaaagagggagactagctccctctttcaactggcttatgccagagctgctttcgctttttcaaccagagcggtgaacgctactttgtcgaatactgcgatatcagccaggatcttacggtcgatttcaacagaggcttttttcaggccattgatgaatttgctgtaagaaataccgttctgacgtgctgctgcgttgatacgcgcaatccacagttgacggaactgacgcttacgttgacgacggtcacggtaagcatactgaccagctttgataacagcctggaaggcaacgcggtatacgcgagaacgcgcaccgtagtagcctttagcttgtttcaaaattttcttgtgacgtgcacgtgcaataacaccacgttttacgcgagccatatgtgctctcctgtatctatattctaattaaaaagttaaaaacgttaacggcttatgcgtacggcaggcacgcgattaccaggcccagatcgcctttggaaaccatggctttcggacgcaggtgacgtttacgtttggtcgcttttttggtcagaatgtgacgcaggttagcgtgcttgtgcttaaaaccacctttaccggtttttttgaagcgcttagcagcaccgcgtacggtcttaatttttggcattttaataacttccacttcgcattgttaataaacgaaacaaaggcgaacaaagcctgtgaagcccgaaggctccacagacagtgctacttgaaggccttactgtttcttcttaggagcgagcaccatgatcatctggcggccttcgatcttcgttgggaaggattcgaccactgccagttcttgcaaatcgtctttcacgcgattaagcacttccataccgatttgctggtgcgccatctcacgaccgcggaaacgcagcgtgattttggctttatcaccctcttcgagaaagcgaatcaggctgcggagttttacctgatagtcgccttcatctgtaccaggacggaatttaatttccttaacctggataactttttgctttttcttctgttccttagaagacttgctcttttcatagaggaatttgccgtaatccattatacgacaaaccggcggctcggcgttagggctgatctcgactaagtctactccggcttcttctgctttctccagagcttctctcagactcacaataccaagctgctcgccttccagacctgttaagcgaacttcctgggcgcgaatttcgccattgatacggttagggcgcgccgtttgaactcgttttccgcctttaataccttattcctccaattgtttaagactgcggctgcgaatctcttgttgcagcttctcgatcacttcatttacgtccatgcttcccaggtctttaccacggcgggtgcgaacggtaactttgccactttccacctctttatcaccacagaccagcatatatgggacgcgacgcaaagtgtgctcgcggattttaaagccaatcttctcatttctcaagtctgctttaacacgaatgcccgcattacttagtttttgcgtcaattcgttaacgtattcagactgactatcggtaatattcatgataacaacctgaaccggcgcaagccaggtcgggaagaaaccagcgaactcttcggtcaggataccgatgaaacgttccatgctccccagaattgcgcggtgaatcattaccggtactttacgttcattgtcttcgcctacataagaagcgctcagacgagacggcaaagagaagtccagctgtactgtaccgcactgccatgcacgatcgaggcagtcatacagggtaaattcaattttcggaccgtagaaagcgccttcacccagttgatattcaaacgggatgttgttttcttccagcgcaaccgccaggtccgcctcagcacgatcccacatttcgtcgctgccaatacgtttttcaggacgagtggagagtttgacgacgatcttctcgaagccaaaagtgctgtacatatcatagactaaacggatacatccgttaacttcatcgcgaatttgttcttcagtacagaagatatgcgcgtcatcctgggtaaatccacgcacgcgcatcaggccatgcaggctaccactcggctcgttacggtggcagctaccaaactcggccatacgcagcggcagatcgcgataagacttcagcccctggttgaaaatttgtacgtgacccgggcagttcatcggcttaatgcagtattcacggttctcagaagatgtggtgaacattgcatctttgtagttgtcccagtgaccggttttttcccacaggacacggtccatcatgaacggacctttaacttcctgatactggtactctttcagtttagaacgaacaaacacttccagttcacggaagatggtccagccgtcgttgtgccagaataccatacccggcgcttcttcctgcatatggtacaggtcgagctgtttaccgattttacggtggtcgcgtttcgcggcttcttccaggcgctgcaggtaagcgttaagtgcttttttgtctgcccacgccgtaccgtaaatacgttgcaacattttgttgttgctgtcgccacgccagtaagcccctgccgttttcattagtttgaaatgatggcagaaacgcatgttcggtacgtgcggaccgcggcacatatcgacatattcttcatggaagtacagacctggcttgtcatcatgggcgatgttttcgtcaagaatggagactttgtagctctccccacggttggcgaaagtttcacgcgcttcgtgccagctgactttcttcttaatgacgtcgtagtttttctcagcaagctcatgcatccgcttctcgagtgcttcgacatcttcctgggttaacgtgcggtcaagatcaacgtcgtaataaaaaccgttgtcaataaccgggccgattgccattttggtatgcggccaaagttgtttaatcgcgtgccctaacaggtgcgcacaggagtgacgaatgatctccagaccttcttcgtctttggcggtaatgatgctcagttgtgcgtcgttttcaatcagatcgcaagcatcaaccagttcgccattaacgcgccctgcgatacaggctttcgccagacctggaccaatgtccagcgcaacatccatggggcttacagcgtgatcgtaatggcgttggctgccatcaggaagagttataacaggcattttatatccttatttgcagtggtgacccacacgaaagatcacatacaaagaaaaatttgtttattaacagttcattgcgaaaccatctagccaacaaatgctaaattggttcgcaatcaggtacacaaatgaaagacattaacctctcaccttccacccggttgagcgatgttaacactaaaaaaagggagattgtacctttccgtttcacattgattcgattcgcaattcgtttgtagtgagtacaccagcaaaacgcttaaagaacaactgataacatcacggtgcgtctgaaaggtttactgcgagcggatttacagcagcataaactgaatccagcaaagttcgttgcgtgatttggcggtagtattttaaacgctcatgagattaatgacgaagtggtcatatcacaatgataaaagtgacacaattcttataacaatttttcgtgcacatttcgttctggcgataataattaatcatcatcctcaaaacctccagatatatataaggcgaacagattatgagtcaaaacgatatcattatcagaactcattataagtctcctcatagattgcacatcgatagcgacataccaacaccttcatcagagcctattaatcaatttgcgcgccagctcatcaccctacttgatacctctgacttaagttcgatgctgtcatactgtgttactcaggaatttaccgcaaactgtcgaaaaatatcacaaaattgttattccactgccctttttaccattaactttgccacttcacccatccatacagaaaatatactcattacattacactataaaaaagaaatcatttccttattactggaaaccacgcctattaaagctaaccatttgcgaagcatactggattatattgaacaggaacagttaactgctgaagatcgtaaccattgtatgaaactgtctaaaaaaatccatagagaaaaaaactatacacccaacagtaaatctcaatggtagtgcatgttttttgcaatctccttctgacgctattttttgtcgccatctgtcattgcaatacgcccttgattcattgagaaatggaaaaggcaaagtcaacctgattaaacattactcctccgttgaatccatacagcagcatgtccccttagtccgggacgcggagttcagagcattacttcgccatcctcctgcagggagtcgcgttatcgcgagtaaggattttggcttcgctttagatattttcttttgtcgaatgatggcaaacaatgtcagtcatatgtccgcgattttatatatagacaatcatactttgtcagtaaggctacgaataaagcagtcagtgtatggacaattaaattatgttgtgtccgtttacgacccgaacgataccaacgttgccgtcagagacacccacaggacagcacggggctttctttcgcttgataagttcatcagttcaggtcccgatgctcagacctgggctgatagatatgttcgcaactgtgcaattgctattctgcccctattacctgtgggagttccaggggctattttcgcgggtattgcatcacgaatgccatttgcccctatacatccatcggcaatgttgttaataatggctacaggccagtctcaacagcttattacattattcaaacagttgcccatactccctgaaaaagaaatcattgaaataataactgcgcagaatagcgttggtacacctgctttatttttggctatgatgaacggacatactgacaacgtgaaaatatttatgcaagaaattcagtcactggtagataatcacatcattcatgaagataatctggttaaattactgcaaactaaaagtgctaacgaaacacctggactttatatctccatgttgtatggattcgatgaaataatcgatatctttctgaatgcattaaccactccaatagcacaagagcttttaaacaaaaaactggtgatgagtattttagccatgaaaatacatgatggtgagccaggattatacgccgcaatggaaaataatcaccctttgtgtgtcacacggttcctctctaaaattaatggcatcgcctttaaatacaagttgagcaaagctaacatcatggatttattaaaaggagctacagcacagggaacccctgcattatacatcgccatgagcaagggtaatgaagacgtcgtgttatcttatatatcgacgctgggtgcttttgcaaaaaaacattcttttagtcaacatcagttatttacactattggccgctaaaaatcatgacaacatgtcagctgttcatatagccattcatcataagcattataaaactgtagaaacatattatgctgctattaatgcaatcagccaaagcctgagttttagtgctgatgaaataaagacgtatttataaccagctatttacgatatatatcgatacataattttatttttttcataaaacgcagaaacagtgaccatgtgcacaacgccacccgacggctgtaataacaaaaaatcccttgatgcctgtcccttttgttacactccgttatcacgcacaagagatatgcaggacactggtatgccgactaaacgctttgataaaaaacactggaagatggtggtggtgctactggcaatctgtggcgctatgttgttgctacgttgggcagcaatgatttggggctgagcagtgacaaacgaagacagccagaccgcataacacggtccggcagataattttacatgctgtagcccaggcttaaggttgtccgacggtcggtatgttccggtgcagactctggaggttcagagttccatgtgacgttgtaagccaccttcagtccaaaatgttcattaatagcaacatttaatgcgctttcggagttcagcgttgtgtcttccgcgccaaagacgctaacaccctgcgtaaatttagcgttgtcagtcaactgccatgcataagccccggaggcatagcccagcggctgggtttcactggcattgtcggtatatttgtcgtaacgcacacctggaccgaattcaaagcggaaactgtgtaccgggccattcaaaaactgacgaccataacccgcggtcaacacatcgcgctctcgatagccgttataacggtctgtcagccagcttgcctgaccaaataaatagtcataatcagttaaattaaaacggctacgcccgcccgccgcatatttttcactagaacgctcatcattagaagaagtattactggcgttcccccacaggctccaggcagtggtgtgtccataccaggtcatggtggtgtcagccgtaagactggagcttttcgtattgccactttgtgcaagatatcctgcgttcagattaccttcgaaaggttttttagcgctggcaggatcatccatgacagtaaaaacggaatcatcggcagctgcattcagactcgcaaacatgccccccgccaacataacgatggcaggaactgtcttcaaaagcttcatttatcaagagtccgtacaacaaaaaaagagaccatcgcggtcccggaaactttcttaaggatcaaagattagcgtccctggaaaggtaacgaattataaaaaggcgcgaataacttagcaatgtattcttatttcattttttgaataagcatgtggcgaaaacagatttttatttatatatatttatctgcaaaattttaaataaagctccaataaatcatattgttaatttcttcactttccgctgattcggtgccagactgaaatcagcctataggaggaaatgatggtacgtatctatacgttgacacttgcgccctctctcgatagcgcaacaattaccccgcaaatttatcccgaaggaaaactgcgctgtaccgcaccggtgttcgaacccgggggcggcggcatcaacgtcgcccgcgccattgcccatcttggaggcagtgccacagcgatcttcccggcgggtggcgcgaccggcgaacacctggttagtctgttggcggatgaaaatgtccccgtcgctactgtagaagccaaagactggacccggcagaatttacacgtacatgtggaagcaagcggtgagcagtatcgttttgttatgccaggcgcggcattaaatgaagatgagtttcgccagcttgaagagcaagttctggaaattgaatccggggccatcctggtcataagcggaagcctgccgccaggtgtgaagctggaaaaattaacccaactgatttccgctgcgcaaaaacaagggatccgctgcatcgtcgacagttctggcgaagcgttaagtgcagcactggcaattggtaacatcgagttggttaagcctaaccaaaaagaactcagtgcgctggtgaatcgcgaactcacccagccggacgatgtccgcaaagccgcgcaggaaatcgttaatagcggcaaggccaaacgggttgtcgtttccctgggtccacaaggagcgctgggtgttgatagtgaaaactgtattcaggtggtgccaccaccggtgaaaagccagagtaccgttggcgctggtgacagcatggtcggcgcgatgacactgaaactggcagaaaatgcctctcttgaagagatggttcgttttggcgtagctgcggggagtgcagccacactcaatcagggaacacgtctgtgctcccatgacgatacgcaaaaaatttacgcttacctttcccgctaacaaaaacattcccccagcattgggggaatcatcaccaacctgtcggcaacgcgtttctccgactatgctcaaaagtcatgtgataacaaaggggtgaactatggccagtggcgatcttgtccgttatgtcataaccgtcatgttgcatgaggatacattgactgaaattaacgagttgaataattacctgactcgcgacggttttttgctcactatgacggatgatgagggaaatatccatgagctgggaactaacacttttggacttatcagtacccaaagtgaagaagaaattagagaactggttagcgggcttacccaaagtgcaaccggcaaagatcctgaaatcaccatcacgacctgggaggaatggaatagcaacagaaaataaatggtttttgggcaataatcagtctgtggtgtgcgttagctcgtgtttttacaccgcattcttgcgctaaccttatgatctggcagacaacatgggagagacatcatgtggcaggcaatcagtcgtcttttgagcgagcagttaggtgaaggcgaaatcgaactgcgtaatgaactgcctggcggagaagtccatgccgcatggcatttgcgctatgcaggacatgattttttcgtcaaatgtgatgaaagggaactgcttcccggttttaccgccgaagccgaccaactggagttactgagccgtagtaaaaccgtcaccgtgcctaaggtttgggcagttggcgctgaccgtgactacagttttctggtgatggattatctcccacctcgtccgctggatgcgcatagcgcatttattcttggtcagcaaattgcgcgtttacatcaatggagcgaccaaccacaatttggccttgatttcgataacgcgctctccacaactccacagcccaacacctggcaacgtcgctggagtacgttttttgctgaacaacggattggctggcagttggaactggctgcagaaaaagggatcgctttcggcaatatcgacgccatcgtcgagcatattcagcagcgtctggccagtcatcaaccgcagccttctctgttgcacggcgatttatggtccggcaactgtgcactgggtccggatggcccgtacattttcgacccggcctgctactggggtgaccgagagtgcgacctggcgatgttaccgctgcatactgaacagccgccacaaatctatgacggctatcagagtgtatccccgctacctgccgatttccttgaacgtcaaccggtttaccaactctacacgctgttaaatcgtgcaaggttatttggcggtcagcatttggttattgctcagcagagtttggatagattattagcagcatgatatgggttgaggataatggccgctccgtgcggccttttgattaaataaacccaagcagagaaaagaacacataacctgcagcaatacaaataaccggcaggatatacagactgaaaaactgcaggaaaatagtatggtgcggaacaacaatacgggactcaatttgttcacgcgttagcccctcttcccctttggctttttccagaatgagttgatcttcaacaccttcccgcaagaagcgcgcctggcgactcatccgggcaccggaatcctgcaacgccagtccgacaaaaatcaggatgaaaatcacccagaacataacgttcacgccaccattaaaattgggcgtcggggagttataccagaatagattcaaaaaaggcgtattcgcctgcatcatatcgatcatgacatgagtaaagtcgagcatgaccgcattaatgccttccttgttttcctgccgggtattcataaatttcagcaaagaaatcaatgtagagatcaatgcaggtataaaaatcacccaacccaaaatccttttcaaaacagcaatgcgtccagcttgttgatacgtcatgagttctccttgattaagacgcgtcgtttcacttagtttacctgtagatatctgttttcgcccattctttaaaggcgatatgataggcgcttaatcataagcacggcttaataccttacacataatgctctaaaggagaggttgtaatgagtaccccgcgtcagattcttgctgcaatttttgatatggatggattacttatcgacagtgaacctttatgggatcgagccgaactggatgtgatggcaagcctgggggtggatatctcccgtcgtaacgagctgccggacaccttaggtttacgcatcgatatggtggtcgatctttggtacgcccggcaaccgtggaatgggccaagccgtcaggaagtagtagaacgggttattgcccgtgccattagtctggttgaagagacacgtccattattaccaggcgtgcgcgaagccgttgcgttatgcaaagaacaaggtttattggtgggactggcctccgcgagtccactacatatgctggaaaaagtgttgaccatgtttgacttacgcgacagtttcgatgccctcgccagcgccgaaaaactgccttacagcaagccgcatccgcaagtatatctcgactgcgcagcaaaactgggcgttgaccctctgacctgcgtagcgctggaagatagcgtaaatggcatgatcgcctctaaagcagcccgcatgcgttccatcgtcgttcctgcgccagaagcgcaaaatgatccacgttttgtattagcagacgtcaaacttagtagcctgacagaactcaccgcaaaagaccttctcggttaatgaccaggggcagtgatctcgctgcccctggttctttatctgaaattgcattcaactgacggattaatcgtcaatttaagagaaagagttacaccgtcaccacttccgtgcactgtataaaaatcctatactgtacgtatcgacagtttagtgagttttatcatgacggcggaaggtcaccttctcttttctattgcttgtgcggtatttgccaaaaatgccgagctgacgcccgtgctggcacagggtgactggtggcatattgtcccttccgcaatcctgacgtgtttgttaccggacatcgatcacccaaagagctttcttgggcagcgattaaaatggataagtaaaccgatcgcccgcgcttttgggcatcgtggttttacccacagtctgctggcggtatttgcgctgctggcaaccttttaccttaaggttccggaaggctggttcattccggctgatgcgctacaaggaatggtgctgggttatttgagccacatacttgccgatatgctgacacccgccggtgttcccctgctctggccatgccgctggcgtttccgcttgcctatcctggttccccaaaagggcaaccaactggaacgttttatctgcatggcattatttgtctggagcgtatggatgccccatagtttacccgagaacagcgctgttcgttggagtagccaaatgatcaataccttgcagatccagtttcatcggcttattaagcatcaggttgaatactaaaaaggcaaaaatcacctttctggaataagcaattccatttgaatataagagccagctcacagttctgttaatcttgcgccaacactatgactgctacgcagtgatagaaataataagatcaggagaacggggatgaactttccattaattgcgaacatcgtggtgttcgttgtactgctgtttgcgctggctcagacccgccataaacagtggagtctggcgaaaaaagtgctggtgggtctggtgatgggtgtggtttttggccttgccctgcataccatttatggttctgacagccaggtacttaaagattctgtacagtggtttaacatcgttggtaacggctatgttcaactgctgcaaatgatcgttatgccgttagtcttcgcctctattctgagcgcggttgcccgtctgcataacgcatctcagttaggcaaaatcagttttctgaccatcggtacgcttttgtttaccacgctgattgcggcgctggtcggtgtgctggtcaccaacctgtttggtttgacggctgaaggtctggttcagggtggtgcagaaactgcacgtctgaacgccattgaaagtaactatgttggtaaagtctctgatctgagcgttccgcagctggtcttgtcctttatcccgaaaaacccgtttgccgatcttaccggagccaatccgacgagtattatcagcgtggtaatttttgccgcattcctcggcgtagctgcattgaaactgctgaaggatgatgcgccgaaaggtgaacgcgtcttagccgctatcgataccctacaaagctgggtgatgaaactggttcgcctggtcatgcagttgaccccttacggcgttctggctctaatgaccaaagtggttgcaggttctaacttgcaagacatcatcaaactgggaagtttcgttgtcgcgtcctacctcggtctgctgattatgtttgcagtgcatggcattctgctgggcattaatggcgtgagtccgctgaagtacttccgtaaggtatggcctgtgctgacgtttgcctttaccagccgttccagtgctgcgtctatcccactgaatgtggaagcacaaacgcgtcgtctgggcgttcctgaatccatcgccagtttcgccgcctctttcggtgcaaccattggtcagaacggctgcgccggtttgtatccggcaatgctggcggtgatggttgcgcctacggttggcattaacccgctggacccgatgtggattgcgacgctggtcggtattgttaccgttagttccgcaggcgttgccggtgtcggtggtggtgcaactttcgccgcactgattgtactgcctgcgatgggcctgccagtaaccctggtggcgctgttaatctccgttgaaccgcttatcgacatgggccgtacggcgttaaacgttagtggcagcatgacagctggcacgctgaccagccagtggctgaagcaaaccgataaagccattctggatagcgaagacgacgccgaactggcacaccattaattcttatgctggcaacggtccgttttgtataggggccgttgccttactttttaaatgttccatcgcggcgatgcatacactctcatatttaaacagatcgtcagcgaaaaaaatgtccaacttatcaatacattcctggctcaaactatgtgcctgtaggctgaagcttaaaacctcatacccgagacgttttctaagactactatctggaatactcataatatcttcaagcacaccacttcccattcccggaagatttagtggattaaaaagaagattgatattaagcatacttattatgctaggaaactttaggagactctcatttttttgaatcgcagcaaaaatgctcccgacaggatgtatataattttgttcatagtatatagtccttaaatagtgaataaccaacctgttttttatactgatcaaattggtcattttttctgggcgaaatacagaagtgacatccattccaataaaatctttatttatacctcttatccgaatttcactaccataaagattattaattattactctatatttaacattgtcctgcagatatgtatcaaaactaagtgctggcgctcctggcttactggcatcatagttaatgttagacatataggcaatcatataattaaagttactttctgctatttcatcgcagtcacattgacccgtacttataaagaaagtgagtgctgtcatagtagactgcagcctttctttaaaagagtcgaaagccaggcttttaatatttaaatcaccataattactctgtattaagtttgtagaaaacatctcccgcctcatattgttaacaaaattattatctcatttaaatctaagtcatttacaatataagtttaagagcgacgccacaggatgaactatcaaaaatagctcatcatgattagcaaaacttaaccattttaaaataaataaacaattaaagaaaaaagatcacttatttatagcaatagatcgtcaaaggcagctttttgttacaggtggtttgaatgaatgtagcaacgaaatacagaatttcaggtcatgtaactcccggcaaaaccgggaggtatgtaatccttactcagtcacttccccttcctggcggatctgatttgcccaacgttgggcagattcaggcacagtaaacgccggactgcgcagaaaactctctcccatcagtacaaacgcaacatatttgccacgcagcatccagacatcacgaaagctatccatctttatcgcatgttctggcggcgcgggttccgtgcgtgggacatagctaataatctggcggttttgctggcggagcggtttcttcattactggcttcactaaacgcatattaaaaatcagaaaaactgtagtttagccgatttagcccctgtacgtcccgctttgcgtgtatttcataacaccgtttccagaatagtctccgaagcgggatctggctggtggtctatagttagagagttttttgaccaaaacagcggccctttcagtaataaattaaggagacgagttcaatgagccaacataacgaaaagaacccacatcagcaccagagtccactacacgattccagcgaagcgaaaccggggatggacagtctggcacctgaggacggctctcatcgtccagcggctgaaccaacaccgccaggtgcacaacctaccgccccagggagcctgaaagcccctgatacgcgtaacgaaaaacttaattctctggaagacgtacgcaaaggcagtgaaaattatgcgctgaccactaatcagggcgtgcgcatcgccgacgatcaaaacagtctgcgtgccggtagccgtggtccaacgctgctggaagattttattctgcgcgagaaaatcacccactttgaccatgagcgcattccggaacgtattgttcatgcacgcggaagtgccgctcacggttatttccagccatataaaagcttaagcgatattaccaaagcggatttcctcagtgatccgaacaaaatcaccccagtatttgtacgtttctctaccgttcagggtggtgctggctctgctgataccgtgcgtgatatccgtggctttgccaccaagttctataccgaagagggtatttttgacctcgttggcaataacacgccaatcttctttatccaggatgcgcataaattccccgattttgttcatgcggtaaaaccagaaccgcactgggcaattccacaagggcaaagtgcccacgatactttctgggattatgtttctctgcaacctgaaactctgcacaacgtgatgtgggcgatgagcgatcgcggcatcccccgcagttaccgcaccatggaaggcttcggtattcacaccttccgcctgattaatgccgaagggaaggcaacgtttgtacgtttccactggaaaccactggcaggtaaagccagtctcgtttgggatgaagcacaaaaactcaccggacgtgacccggacttccaccgccgcgagttgtgggaagccattgaagcaggcgattttccggaatacgaactgggcttccagttgattcctgaagaagatgaattcaagttcgacttcgatcttctcgatccaaccaaacttatcccggaagaactggtgcccgttcagcgtgtcggcaaaatggtgctcaatcgcaacccggataacttctttgctgaaaacgaacaggcggctttccatcctgggcatatcgtgccgggactggacttcaccaacgatccgctgttgcagggacgtttgttctcctataccgatacacaaatcagtcgtcttggtgggccgaatttccatgagattccgattaaccgtccgacctgcccttaccataatttccagcgtgacggcatgcatcgcatggggatcgacactaacccggcgaattacgaaccgaacagcattaacgataactggccgcgcgaaacaccgccggggccgaaacgcggcggttttgaaagttaccaggagcgcgtggaaggcaataaagttcgcgagcgcagcccaagctttggcgaatattattcccatccgcgtctgttctggctaagtcagacgccatttgagcagcgccatattgtcgatggtttcagttttgagttaagcaaagtcgttcgtccgtatattcgtgagcgcgttgttgaccagctggcgcatattgatctcactctggcccaggcggtggcgaaaaatctcggtatcgaactgactgacgaccagctgaatatcaccccacctccggacgtcaacggtctgaaaaaggatccatccttaagtttgtacgccattcctgacggtgatgtgaaaggtcgcgtggtagcgattttacttaatgatgaagtgagaagcgcagaccttctggccattctcaaggcgctgaaggccaaaggcgttcatgccaaactgctctactcccgaatgggtgaagtgactgcggatgacggtacggtgttgcctatagccgctacctttgccggtgcacctagcctgacggtcgatgcggtcattgtcccttgcggcaatatcgcggatatcgctgacaacggcgatgccaactactacctgatggaagcctacaaacaccttaaaccgattgcgctggcgggtgacgcgcgcaagtttaaagcaacaatcaagatcgctgaccagggtgaagaagggattgtggaagctgacagcgctgacggtagttttatggatgaactgctaacgctgatggcagcacaccgcgtgtggagtcgcattcctaagattgacaaaattcctgcctgatgggaggcggcgcaattgcgccgcctcaaatgatttacatagtgcgctttgtttatgccggatgcggcgtgaacgccttatccggcctacaaaactgtgcaaattcaatatattgcaggaaacacgtaggcctgataagcgaagcgcatcaggcagttttgcgtttgtcagcagtctcaagcggcgcagttacgccgcctttgtaggaattaatcgccggatgcaaggttcacgccgcatctggcaaacatcctcacttacacatcccgataactccccaaccgataaccacgctgagcgatagcacctttcaagctcgcacttgtcaacacatccagctccgttaagcgtgggaaacagtaagcactctgacggatagtattatcgataaacgccggatgacacatcacctccaggctacgatcaccccgatggcctgcgtcatccagcacttgcaggaacaggctctcactgatctcttcaccgtagaatgcactgctgaatccctgggtagtgcgcaggttgaccggcaaatcaaacgccatctgacgatccgcccgcaacgcaatgccctgctctgccgcaaacctggcaacaatcgggaaaatctgcgggaacatatgcacatgatgatggctatcaagatgcgtaggtttgcgtccaaatagctcaatgaaacgcaaatactgactgacaagctcctgagtaatttcttccagcggtaaagcatcttcttctgccaactgccagatccattttcccagcacaccatcgcgggttaaccccggcatagctgtcagtggcttacccatagtaaggacaaagtgcatccctatggccagactcggttcatcacgactcaactgcaccgcatggtcaatagcctgcccattcaccagcgccgtcgtgctcgtgacaatcccattgcgacaggcctcgataatgccgtagttctgacctttgcttaagccaaaatcatcggcattaacaatcagtaagcgttccataatcagcctcggttaatgtgcttttttaagctctgcgatgcagtcggcaaagtttggcagccatttctcgtgcgccagaatcatctcgcgtgccagcagctcagcatcgcgatcggaatgcaccaacggactaaggtttagcgccagtaacacatcgttaaattctccgctaagtgcggcgttactggcagcaatctcgaagcctttaatggtgtgaatcagccccattactttatcatcgaaatgcgtaatgcgcggatgtggcgtcgcgccatcgcgccccagcttacaggtcatttctactgcccagtctgccggaatattatcaatctgcccatgatgcgggatattaacgtaatgttctgcttgcttgtcgttgtagatagcgttgatcacttcgcatgctgcatcagagtaataagccccaccgcgctgttccagttctttcggcttaactttcagctcaggatttttatacagctcaaaaagttgtttctcgactttctgtactacctgcgctcgtgcgccgcctttgtagtattcgcccatttcaatagccagcatctctttctgcttgaagtaatacagcagataagaacatggcagcagattcaagctacgaattaagccctcactaaatggcagatcgaaaatattttttacagaggacgcttttaactgcccactcgccacaccatcaagcaattcggcaaagcggctcttgccatttatcagcacatccttaatgaacaccatatggttgaggccgaacaaatcgatagataaatcatcgctgtctttcagcatcagaacatcgcgaataaacatcttcatgccgatcggaatattacacacgccgataaagcgtttaaatccggtatgacgataaacggcttcagtgaccattcccgccgggttagtgaagttaatcacccatgcattcggacaaagttcttcgacatcttttacgatgtcaaaaatcaccggaatggtacgcagacctttaaacaaaccgcccgcgccgttggtttcctgaccaagataaccatgacttaatggaatacgttcatccagttcacgcgccggtaattggccaacgcgcagttgggtagtaacgaaatcagcatctttcaatgcttcgcggcgatccagcgttttataaagcttcatcgggacgccagcgttatcaatcatccgttggcagagatcgaaaataatatccagtttcggtttaccaccttcgacatccaccagccataattcgctgaccggcaattcgtgataacgcttaataaatccttccagtaactccggggtatagctgctcccgccaccaatagtgacgacttttaatttctggctcataatttctcccttcagtacagaatactgatatctggcatatctgcccccccggacataaataatccagcaacaggacagatatgtgaattgtcaggtataacgacttactgattaaattcagtcaatttcttacgatagctcttaggcgtaaaggacgttaatttcttaaacgttttaataaacaaactcgggctactataaccggcctcaaacgcaatatccgtcacactatagttggtcatttccagttgttttttggcaaaattaatacggatttcattaataatctgcattggcgttttgccataatatcgttgagtcgctcgcgtcaaatattcctgacttttggcactcaacgccaccatattctccagcgcgctttcactaaactgctctttatcatgcatcttttctaccgtacttttcagccactgcggtacatcatcaatcacctgttcttcgcggtaatgacgtaaacggttaatgacataaaaagtaaccatctcaacaaactcttccagccctgtttcgcggaaattcaaactagaaatcactgtttccacataggtgagaaaagcgttattggtccggtatacctggctagcgacaaagcaataaggcaacaatggcaggtaatgctgctcaaaaaagcgtttactgatcccaacgttcaatatgcgcgtggcaccaaactcataaaaactttgatggtggctacctaacggaataaaaacaaaatcgccccgttccagtaacacgcgcttaccgttaatctcctggaaataacgcccggttaataccagagtaaattcataatagtcgtgctgatgcagtccgctgatactctcagttttgttatagataaacacatggaagtttttgccattaaacaactgctgttctcgggcagtggcaatttccggcgcgttaatcactggctgcatcatcgactccttatgccttcagtttttcatgaagctcaattaattcagtaatcagttcacgcgcaagcatggacgtcattaaatgatcctgagcgtggaccagcaccagactcactttcatcttaccttcgcccgcatcgccttcaatcagtttcgtctgtaccagatgcgcttcattcaatgccatccgactctgatccatcatggcttttgctgcggcaaaatcgccctgcttcgcctgtttcagtgccgcatacgccaggctgcgcgcttgtccggagttgatgatcagccccatcaccacttcttccagctcttcagcttccgtttgcgtatcgggaatgttatcgagatccatcatacatcgttcctctcttttcttaccggcacgattacccgtaccggcatcgattaaaatttcagggcgttagcgatatcttcttcgctctcttctttatcaatcgcattttgtgctttgttagccaccacaacaaagggcagataaattaacgttgcgatgccaaggttgaagagtgcgaccagcaatgcggcgacgctaccgttggtgttaaagaaggctcccagaccggttggcatggtccacggtgcaatattggtcaccggaggaataatgcccatgtagtacgctgcgagggtgattgccgccagaatcggttgtaccagtacaaacgggataaacatcaccgggttcatgataattggcagaccaaacagaatcggttcgttaatctggaagatgccggacggcagcgccagttttgccacctgacgataatcagcacggcgagaggcgataaagatagccaggatcaggcctaaagtcgcaccactgcccccaaggaaaataaaggagtccagcatcggcttggcccagatatggaaggtcttaccggctgccagcgccgcttcgacggaaccatattgctgataggtcgcgatattttccagtgcccacggcgtcataatgccgttgtccagtgcggtcagcgccagcgcgccatgaataccgaagaaccagagcagtggaacaaagatcacataggcccagcccaccacgctacccaagcttgccagtggggtactgatggtatccataatgatctgatggaagttggtgccccaggtattcaacgcccaggcaataatccccatcacggaaagaataataaagccgggaattaatgcgctgaaggaacggcttacactagcaggtacgctgtcgggcagtttaatgacccaattgcggcggacaataaaggtaaacatttctgccaccaccaggccaataataatcccggagatgatattcgccccacctaaccagtttgcaccaaccgcataggcctcaccgacactatatggggtgacggtcataaatgctgcaacggataacaacccagccgccagcgcatcgactttacgctcttctgccagcgccatgccaataaagaacggtgccattaaagacattattcctaatgttccgttatatacgttgccgccaatacctttcagaccattaagtgtttcaatggtactggcgtcgaggcgaatacctaaggaataaaaaaagctcccctccccaaagcttagaaaaacgttgttaattaatacaaacatggcccccgcaagggttaacggcattaagcgaataaagccatttttgattgcattaacgtgtggctgctttcctattttaactgcaaaagggaggagtaccttttcaaggcttgcaataacattactcatagaaaaatacccttaaaaaccgcaatttaaatattgcggtattgatttatgaaataactctttgacgggaaaatttaaaataaattaatttgctgcggcttttttaatcgctgcaaccgcagccttaagcacgcctaaaccatcgactttgccataaagcaggctgtcaattacttcaaccggtttgttgggtaacaaacgctggatttcgggcaacatataagcaatctgcggccctaataacacgacatcggcattctgacctttttcaccagccagtgtttccggaaatgcttcaataatgaccggaacttcatatttttctgcctgtgcgcgcattttacttaccagtaaagaggtagacatgcccgcagaacaaaacagataaatgtgtttcttttccataaaactgccctcatcgacgattatctgtcagccagacactccgcaagccttaacctgcttccatgctctgggtaacttgcgaaaccaacatgactttttttgtggctgaaaggagtatacggtatagacctgagcaatagtatttctttgaccttataaattgtttctccttgacctgtggttatgaccctcttcacatttcgggcaaataattcgcgaagataattaagaactcaggccaaaaaaaaccggcgcaatggccggtttccgttgttactcaagctttcagacgaattgattacttcgcagcctgtggatcagtgtcgtattcagcacaggtctgataaccggagttgatgacatatccggtatcatctaacgcgacaaagtaggtttctgctttaccatcacgttgacccaggatgtaggtctggcaagtaccgcgagcatggatcatgctcacttcagagctaggtttacccgcaatttgtgcaacctgcgcccggctcatgccttttttgacgtctttcaccacaggctgtacaaactggtctttggtacgatcataagccgtacaacccgccagcatggttaataccgccgctgcactcagaattcctgccatattcttgttcatattccgtcctcttgtttatcagcgtgttagataagcctggaatacattgggcgctttttcaagcccgtgaacgaaacggctccgctttcagaggattcctgtatgacgttttaaccaccattcagcccgctgtcgcttgtcgtttcagtagcaacgggttagctttaaggaagttttgtcttttctgtctggaggggttcaatgacattgcaacaacaaataataaaggcgctgggcgcaaaaccgcagattaatgctgaagaggaaattcgtcgtagtgtcgattttctgaaaagctacctgcaaacttatccgttcattaaaagtctggtgctcgggatcagcggcggtcaggactccacgcttgccggaaagctgtgccagatggcgattaatgagctgcgcctggaaaccggcaacgaaagtctgcaatttattgccgtacgcctgccctatggtgttcaggccgacgaacaagattgccaggatgccattgcctttattcaaccggatcgcgtattaaccgttaatatcaagggcgcggtattggccagcgaacaggcattgcgggaagcaggcattgaactgagcgattttgtccgtggcaatgaaaaagcgcgtgagcggatgaaagcacaatatagcattgcgggtatgaccagcggtgtcgtggtgggcaccgatcatgcagcagaagccattaccggattcttcactaaatatggtgacggcggtacggacattaatccgctgtatcgtctcaacaaacgtcagggtaaacagttactggcggcattagcttgcccggaacacctttataagaaagcgccaacggccgatctggaagatgatcgcccttctctgccagatgaagtggcactcggcgtgacctatgacaatatcgacgactatctggaagggaaaaacgtacctcaacaggtcgccagaacaatagagaactggtatctgaaaaccgaacataaacgccgtccgccaattaccgttttcgatgatttctggaaaaagtaataatttgcacatattggattgtgcgaaaaagagtaatttgttcacgccggatgcggcgtgaacgccttattcgacctataaaactatgcaaattcaatacattgcaggagtcgaataggcctgacaggcgtagcacgtcagacggtgtaacctttgtcatcgacccgcctcttttttaatcgcttcccgcctgttacactggatagataaccagcattcggagtcaacagtggtacggcgtttaacttctccgcggctcgaatttgaagctgcggcaatttatgaatatcccgaacatttacgtagtttccttaatgacttacccacccgaccaggggtgtatctgtttcatggtgaaagtgacaccatgccgctctatatcggcaaaagcgttaacatccgcagccgcgtcctttctcatttacgtaccccggatgaagccgccatgctacggcaatcccgacggatcagctggatatgtaccgccggtgaaatcggcgctctgctccttgaagcgcgattaatcaaagaacaacagccgctgtttaataaacggttgcgccgcaatcgccagctctgtgccctgcaattaaatgaaaagcgcgtcgatgtggtgtatgccaaagaggtggattttagtcgagcccccaacctgtttggcctgtttgccaataggcgcgcagctttgcaagcattgcagaccatcgctgatgaacaaaaactttgttatggcctgctgggactggaaccgttaagtcgcggtcgtgcatgttttcgtagtgcgctaaaacgttgcgccggagcatgctgcggtaaagagagccatgaggaacatgcgctacgcttgcgccagtctctggagcgtttgcgggtggtgtgttggccttggcaaggggcggtggcgctgaaagaacagcacccggaaatgactcaatatcatattattcaaaactggctgtggctgggggcggttaatagcctggaagaagcgacaacgttaattcggacacccgccgggtttgatcacgacggttataaaattctttgtaagccgctgctttccggtaactatgaaattactgaacttgatccggcgaatgaccagcgagccagttgattactgaacttgatccgggctatgaccagcgagccagttgatttcactgaacaacagtttaccttgcggttgtaaaagccgcagggtgtgcctgccatcgaaccagcacgcgccctggtcggtagtgagcaatttatcgcccagttgccacgccccgttaatcacaaacaccaccccgccgcgactgccaaaggtagtaaacgtacgttcggcaattctgactttcgccttacagacatccaggcgtgtcatgatgttgaaatccatgctcatctgccctgccgtcagtttcgcttttaccacctggtccgctgcaaaggcaaaaggctggaacggttttaaggtatggttaaagcggtctgcgctttcaaggagcatctcgccgccttccagcaacgtcactatcctttccatgccgggaaacaaagaaaactccccattcgccgcgatggatgcaatgctggcacgccagtaaaaatcacgttttgccggtgggaacgtgcaaatttcgcgcgtttcaccggcagcatttcgccacagattcacgctcattttacgcatatcaaagtattccatactcgctcccggcccgttcttttcattgttatcgttcaggtaaccgtggatggttatcggcaactcgggtgatttacgttagtggtgatcaggctttttttacaactgtttgagaagagaaaagaaaaccgccgatcctgtccaccgcattactgcaaggtagtggacaagaccggcggtcttaagttttttggctgaaagattattcagcagttgcaggcattttaccttttgccgctggacgttctgtcagacgcttctcaaaattagcattaaattgctttttctgttccggcgtcaggatgttgtaaattttgttctgggtttccatgtgcgccagcatgttagctttgcgctgttcttccatttttgcgatctgcgcttcagcttttactttatcgaaggtatcgctggcaatgatgtcatgcattgcgcggcgttcttccagcggcggacgtttcatctggtcacgctggcctttcatgatttcgcggatctgctgtttctgcgcgtcggtcaggttcaggtctttgaacatcatgtcctgatgcggaccgaacttgcctttgtggtgcatcatcggcttcgcgtcagccggtgctgcggtagtggtgtctgcggcatgggccaggttagccgcgccaagagccagggtagaggcaacaaacagtgcagttaatttacgcatattctatatccttcctttcagttatttattacggctttcttaagtagcgtgccgtgttgacgagattaactttactgactttagcgtcaattaatcagagcaacggtaaaacaatgaaagtgtaaaaaacacttttgcgccaattatggagaaaaaaagaaaatttgatggagagtgatgagagaatattacaacacgatgattttgcagagattatgaagaactataccggatgactggtgataaataaagcaaataaccaggattaatctgtattaatttataagaaagcaacttaatacccgcagaatgatttctgcgggtaagtattagcttattttttcgagcattaatcccgcgcgtaatcccaacgctaccaacggattagggaataacacatactctacatcatgggttacggtaaaacgttcctctccgtcctgcgccagcaatgttcctttctcaaacggcataaaattcagcgtgtcacttgccatatgcatttcgaaggacgggctgtggcgagtaatttggctaaccacccgataacggagcggcggtgttctcacgataccgacactctcaccagatagcagcgcagcaattgcgctggcagttactgcaaactggcgaagatcgttttgcccaaagggcaacgctttgccaagttccagcgtacaggccagcgcgccaaaatgtctggcgctgaaatgggtaaacgtaccaccaggttcctgatggaacaccagcgcctccagccccgccgcacccagccacgtcagaaatttctcgtcccagggaatgtcgcgttgcggtaatacaccgaactgcggatgcaaggagccacgaattgcggtatgtagatcaaggtgccagcgcacagattctttgccctggtcataaaaatcttccaggcactgttccagttcgcgcgcccgacaggtttctccgctttcagcaaatagctgccaacgaccgccaaacattcgattcatatcgctatggcaataacgtttcccttgcttcagcgcaggaggattcccgaggatcaccagcaaccgccaacgtaacgggatctcgccgtgagatatcgcgccaagcaacgcgtccagcatctccacaggtgccgtctcattaccgtgtattcccgcactaatcaccagtgcgccttgcggtggcgttaatggcgtcagttccagcacaccatcgcccagccagcgccagcgaacgccgttgatttctcgctcggtgataaccggttttttacccgttaaggtcagagcaagaaaattatccattgccccctccctcgcgctggaacggataaacgctaccgagattcagtaattggctcaatacatccagtgcttcccgcccttcgcgcagcaattgcgggtcggccagatcggcagcagtaaggcgatcgcggtagtaacgatccacccagtcattgagcgcattaaacagcgtatcgttcatcatcaccgccggattcaccgcccggcgttcttcttctgtcaataccacccgcaaccgcaggcacgccgggccgccgccattcgccatgctttcacgtaaatcaaagacttttagttcgctaatcgggttgtcagcggcaaggagttcattgagataaccccatactccggcgtgttcccgacactcctgaggcagcaccaacatcatggaaccatcatcgcggctcagcagttggctgttaaacagataggtagacaccgtatcagacacggaaacctgagttgccggaacttctatcgccataaaaccattgacccgcgcacgcaggtttgccagtaactgactctggcgagcgaacgcctgttggtggcaaaacagcacctggcggttactcacggcaatcacgtcattatgaaaaacgccctggtcgataacgtccgggttttgctgggcgaaaatcacctgttggggattcacctgattcagccttgccaccgcctcgctggcttcgcgagtctgtcgcgccggataacgggaaggccgggtatcattgccttcttctcgcccgtagacaaaaagttgcatacccggttcaccgtaatgaccgccgagacgattgtggtttgccgccccctcatcaccgagcaacgctacctgtggcaacgcgctatggacgctaaatttctcttcgtcgttaaaaatcgcttttaacaggctttcagtgacgggcgcttccaggctacggtgaaatttattgttcaggttggcaacggtgagatgcactttgccatccagcgtatcggcagatggcgcgatcgttgccgcattggctacccacattgggctagcggaactgacgctggaaagccagtgcggtgcctggcgtgcaactttttccagtacctgctcatcgctaccactgaatcccaactgacgcagcaccggaataaacggacgctcgtgcggcgggatcacggcctgggggaatcccgcatcggcaagggctttcattttcagtaagccctgcttcgccgccagtcgcgggttagacacctgaaaacggtgacgggtagaggcttcattaccaaagctcaggcccgcgtaatgatgcgtcagccctaccagcccgtcgaaattgacttcccaggcgttcatcgcaccacctcatcggaaaaatccagcccggggttaagcgtggcgggcaatgttaagctgtcgctctccaggctcgccatcggccatgcgcagtaatctgcggcataccaggcgctggggcgatggttaccggaagcaccaatgccgccgaatggcgcggtactggcagcaccggtaagcggtttgttccagttaacaatccccgcccgcgcctccagcaacagttgatcgaacttttcccgctcgggggaaaccagaccgcaagagagtccgaagcgagtgttattcgccattcgaatcgcttcatcgaaagtatcataacgccagacgcgcaataacggtccgaacacctcttcatctggtacgccagcaacgcctgtcatttcaatgatccccggcgtcagcaagcttgtccctgcttgtaataagcgcggcgcaagcaggggtcgtccgcccatcgcttccagttgctgccatgcagtaaccacctgctgtgcggcctgttcagaaatcagcccgccaataaacggctgcggttcgtcatcccagttgcccggcgttaatcgctggctgacggcaaccagacgagcaagaaacgcatcgccctgcgccccgcttttcagcaataaacggcgggcgcaggtgcagcgttgaccggctgtgacaaacgcgctctgaatggtcagatggacagccgcgtcgatatccgccacctcatcgataattagcggattattaccgcccatctcaagggcgagaattttctccggctgaccggagagctggcgatgcaactggtagcctgtattggcgctaccggtaaacagcaaaccgtcgagatcctccagcgcactcagcgcctgacccgtttcacgcccgccctgcaccaggttcagcacgcctggcggcaagccagcctgctgccataaacgcattaccgcttcgccactccacggtgtcagttcgctgggtttaaagataatggtgttacctgccagcaatgccggaacgatatgtccgttcggcaaatgaccagggaaattatacggcccaaacaccgccagcacgccgtgcgggcgatgtcgcaggctcgccgcgccgtccggcatttcactacgctgctcgccggtacgaacgtgatacgccttaatacttatcgcgattttattgatcatcgccgtcacttcggttgccgcttcccagcgcggcttacccgtttctctggcaataatcgcggttaattcggctttattgctttccagcagtgcggcaaagcgttcgacaacggcatgacgttcagcaaaactaagccgcgcccagcgcggaaacgccgcacgggctgcccgacaagcctgctcgacctgagcggcatcggcatcattgccttgccataacacctcgccgcttaccggattacgcttcacacggcttgcgccctggcccgttatccagtcaccgttaatccataaagtcatgctgttttctcctctgcgcacaggcgcaccagacgaacgcgatccccggcgtggcatttgagggcatccagttgtgcggcggttaaaatcaaacgctcggttgccggatcggtacgcaccagcaccacgcggaaatggtgataattttcattggcgaccaggcaggctgggaaatcgccctgcgcaggctgcccttctgccacttccaccagccgacttttacggatggcgcgcacgcggtcgatgtcacactcaagcgtcggcccaccgtcaaagatgtcgatatagttacggtagcgaaaaccttctttctccagcaccgcgcgggcaggcgcggtttgcggatgtacctgaccgatgacgtcctgggcttcctgggataaaaagtgggtatagatcggatgtttcggcatcagttctgcaataaatgccttttgcccggtgccgcagagaaaatcggcgcggctaaaatccatgctaaagaagcgtttaccgaggctttgccagaacggactatagccgtgttcgtcaatcaccccgcgcatttcagcaaccactttgtcattaaacttgtcgcgaaaagccgccataaacataaagcggcttttgctcagcaaatagccgttgccctctttgcgccagtccgggtcgagaaacagcgtgcacagctcgctgctgccggtgtgatcgttactgagaaacagcgtcggcaatgcgttatagacattcagctctttactggcgtgaaccaacgtgccgacgcgatagttgtaccagggatcgttcagcccaaccgccacctcaatggcacaaatccccgccacggtgcctgtctcgctatcttccagcacgaacacatagccctgctcacttttgggcagttcgccttgccaggttttgattgccctttcgatacgcgcgctaagcgtggcttcattggcgggaaggctcgtcaggccgccgcccgttttgctggcaagctgcatcagcgcgctgacatcacttcgctcaacgggacggatgaccatcatgatgaacctcggctaacaaattatttcaactactacctcggctaacaaagtgttcgcaagcagctgcaaagcgatccagtccggtcgtcacctcttcttcgctgacattgagcgcaggcgcaaaacgcaccacgttgccacccgcaatcagtaccatcacgcctgctttcgccgcttcctgagagatctgtttcgcttgcccggcgtaatcggcattcagtacacagccaatcagcaaacctaagccgcgaacttcactgaacaaaccatagcggtgattaatagtattaagacgctcaacaaaccagtcgtgacgctgtttaacgccattaagcatctctggtgtgttgatgagctccagcactttgcctgccaccgcgctggccagcggattaccgccataggtggtgccatgagtgccaacggtcatcacgcgggcgcactcttcggttgccaacaacgcaccgaccgggaaaccgccgcccagcgctttggcggtagttaacagatcaggcgtcacgccgtagtgcatataggcatacagttccccggtgcgcccgacgccggtttgtacttcatcaaaaatcaacagcgcattgtggcggttacacaattcacgcagaccttgtaaaaacgcgttgctggctggcaccacaccgccttccccctggatgggttcgacaatcaccgcacaggtagagtcgtcaatcagcgcgctggcagagttaatatcgttatatgcagcatgacgaatatccgccggcagtggcgcaaaatcctgactataggctggctgcccacccgcactgacagtaaacagcgtgcgaccatgaaacgcatttttgaacgccacgatgccgctcttatggctgccgtagcggtcgtgagcgaatttacgcgccagttttagcgccgcttcgttggcttccgcaccggagttacaaaagaagacgcgatcggcaaacgtggcgtcgatcaattttttcgccagtcgcagtaccggctcgttggtgtaaccgttgccggtatgccagaacttactcgcctgttcgttcagcgcttcacgcagttccggatgcgcatggcccagcgcgttcaccgcaatgccacccgcgaagtcgatatactctttcccctgctgatcccacaagcggctaccttcgccacgtaccggtataaagggtgccggagcgtaaacaggtatcatccattcatcaaagttttcacgcgtaattggctgagacatagcgacctctacagtaaataattcgttatttatatgttaataataagtaatgtttgcgctgtaaatgtagattgcagggttcgtgccagccagtgataaaagtgcataaacggcggaggctaactggaaatcaaggagttataaccaaaccatatgcatttaaagtgcatataaagtgaatacgtttgcgatgtgggtgaataaaaagaataaaaaacgcaatgttatgcagaagtaaaatataattctggaattgtgatcattgacgaaatttactggaaattactgcgccattctgacgcagcgcgcaccaaaagcgggcatttttttgcgccatcgttgacatcattaacaaccatcgatcaaatcacttaacaacaggcggtaagcaacgcgaaattctgctaccatccacgcactctttatctgaataaatggcagcgactatgaaatttgtctcttttaatatcaacggcctgcgcgccagacctcaccagcttgaagccatcgtcgaaaagcaccaaccggatgtgattggcctgcaggagacaaaagttcatgacgatatgtttccgctcgaagaggtggcgaagctcggctacaacgtgttttatcacgggcagaaaggccattatggcgtggcgctgctgaccaaagagacgccgattgccgtgcgtcgcggctttcccggtgacgacgaagaggcgcagcggcggattattatggcggaaatccccagtctgctgggtaatgtcaccgtgatcaacggttacttcccgcagggtgaaagccgcgaccatccgataaaattcccggcaaaagcgcagttttatcagaatctgcaaaactacctggaaaccgaactcaaacgtgataatccggtactgattatgggcgatatgaatatcagccctacagatctggatatcggcattggcgaagaaaaccgtaagcgctggctgcgtaccggtaaatgctctttcctgccggaagagcgcgaatggatggacaggctgatgagctgggggttggtcgataccttccgccatgcgaatccgcaaacagcagatcgtttcagttggtttgattaccgcagtaaaggttttgacgataaccgtggtctgcgcatcgacctgctgctcgccagccaaccgctggcagaatgttgcgtagaaaccggcatcgactatgaaatccgcagcatggaaaaaccgtccgatcacgcccccgtctgggcgaccttccgccgctaatttagcagctctcctggctcaaactgggtcaggagaattaaccttgagaaaaatcaacaaactgtcagtaatgatttgttgcctgccgtcctttgttataccgtctctgcgtttttagttgtctgaccacttctctattatcaagtttgatataggaaactccacgatgaacgctgagcgtaaatttctttttgcctgtcttatttttgcgctggtcatttacgctatccacgctttcggtttattcgatctgctcaccgatttaccccacttacagacactcatccgccagagcggatttttcggctatagcctctatattctgttattcatcattgccaccctcttgctgttaccaggaagcatactggtgatcgcgggaggaatagtttttggcccgctcttagggacactactcagtttaattgccgccacgctggcctccagctgcagtttcctgctggcgcgctggctgggacgtgatttactgctgaaatacgttggccatagcaataccttccaggccattgaaaaaggcattgcgcgtaacggtattgattttcttattctgacccgcttaatcccgttgtttccttacaatattcaaaattacgcttacggattaaccacaatcgccttctggccttatacccttattagcgcactcacgaccctacccggtattgttatttataccgtgatggcaagcgatctcgccaatgaaggcattacgctgcgctttattttacaactctgtctggcgggcctggcgctgtttattctcgtccagctcgcaaaactctacgcccgacacaaacatgtggatctgtctgctagccgccgcagcccacttactcacccaaaaaatgaaggataaaacgatgttgcaacattatagtgtgagttggaaaaaaggactggctgcactctgtttactggctgttgctgggcttagcggctgcgatcaacaagagaatgcggcggcaaaagtggaatacgacggacttagcaacagccaaccgctgcgtgtcgatgccaataaccatacggtaaccatgctggtgcaaattaatggtcgtttcctcaccgacgacactcgtcacggtattgtgtttaaagatggctccaacggacataaaagcctgtttatgggttatgcgaccccgaaagcattttatgaagccctgaaagaggcaggtggtacgccgggcgaaaacatgacgatggataataaagaaacgactcatgtcacaggcagcaaactggatattagcgtcaactggcaaggggcggcaaaagcgtattccttcgatgaagtgattgttgacagtaatggcaagaaactggacatgcgctttggcggtaatttaacggcagcagaagagaagaaaacgggttgcctggtgtgtctggatagctgcccggtcggcatcgtcagcaatgcaacatacacttatggtgcggttgaaaaacgtggtgaagttaaattcaaaggcaatgccagtgttctcccggcggataacacgctggcaacggttacctttaaaatcgccgaataaagccaggataaaggatgatgatgatgcaaagccgaaaaatctggtactaccgtataaccctcatcatcctgttgttcgctatgctgctggcatgggcgctgcttcccggcgtccatgagtttatcaatcgcagcgttgcggcgtttgccgccgtggaccaacagggtatagaacgctttattcagtcttacggcgcactggcggcagttgtcagcttcttgttgatgattttgcaggccattgctgcaccgctacctgcgtttttgatcacctttgccaatgcgagcctgtttggcgcgttctggggcggcttgctgagctggaccagtagcatggccggcgcggcgctgtgcttttttatcgccagagtgatgggccgcgaagtggtggaaaaattaaccggcaaaaccgtgcttgacagtatggacggctttttcactcgctacggcaaacacaccattctggtctgtcggttattgccttttgtccctttcgatccaatcagctatgctgccggtttgactagtatacgttttcgcagcttttttatcgccaccgggcttggtcagttaccggcaactattgtttattcctgggcgggcagcatgttaacaggcggtactttctggtttgtcaccggactgtttattctgtttgccctgaccgtggtgatttttatggcgaagaaaatatggcttgaacgccagaagaggaatgcctgatgggtttaccgccgcttagcaaaattcctttaattttacgtccacaggcgtggctgcatcgtcgccattacggcgaggtgctaagccccattcgctggtgggggcggatcccgtttatcttttatctggtgagcatgtttgttggctggctggagcgcaaacgcagtccgctcgatccggtagtacgaagccttgtcagcgcgcgcattgcgcaaatgtgcctgtgtgagttttgtgtggatatcaccagtatgaaagtcgccgagcgcaccggcagcagcgataaactgctggcagtggctgactggcggcaaagcccgctctttagcgatgaagaacggctggcgctggagtacgccgaagccgcaagcgtaacgccgccaacggtcgatgatgccctgcgtacccgactggctgcgcattttgacgctcaggcgctcaccgaactgacggcattgatcggcctgcaaaatctgagtgcccgttttaattctgccatggacattcccgctcaggggctgtgccgtattcctgaaaaacgttcttaaggagagatgatgcgccattgtgggtggttgctgggattgttaagcctgttttctctggcaacacatgccagtgactggcaagaaattaaaaatgaggccaaagggcaaaccgtctggtttaacgcctggggcggcgataccgcaattaaccgctatctcgactgggtgagcggcgagatgaaaacccattacgctataaacctgaagattgtccgtctggcggatgccgcagacgcggtgaagcgcattcagaccgaagccgcagccggacgtaaaacgggcggcagcgtggatctgctctgggtgaacggcgaaaacttccgcaccttaaaagaggccaatttattacaaacgggctgggcggagactctgcccaactggcgctatgtcgacacacagctgccggtgcgggaagatttttctgtgccgacacaaggtgcggaaagcccctggggcggcgcacaactgacgtttatcgcccgccgcgatgttacgccacagccaccacaaacgccgcaagccttactggagtttgctaaagccaatcccggcacggttacctatccgcgcccaccggactttaccggcacggcgtttcttgaacagttgctgattatgctgacgcccgatcccgccgcattaaaagaagcgccggacgatgcgactttcgcccgtgtcactgctcccttgtggcaatatcttgatgtgctgcatccgtatttgtggcgcgaaggaaaggatttcccgcctagtcccgcgcggatggatgctctgctgaaagccggcacattgcgcctgagcctgacctttaaccccgcgcatgcgcagcaaaaaatcgccagcggcgatttgcctgcaagcagttacagttttggctttcgcgaggggatgattggcaacgtgcatttcgtcaccattcctgccaacgcgaatgccagtgctgcggcgaaggtagttgccaatttcctgctcagtcccgatgcgcaactgcgtaaagcagatcccgctgtctggggcgatccttctgttctcgatccgcaaaaactgcctgacgggcagcgcgaaagtttgcaaagtagaatgccgcaggatctgccgccggtactggctgaaccgcacgcaggttgggtaaatgcgctggaacaagaatggctacaccgttacggtacgcattaatctttttgctgtgggcgatggtggcggtgatttatgcaccgctgatcccggcagctctcacgctgataagccctgctttgagcttgacacactggcaggcgttatttgccgatccacagttaccgcaggcattactggcaacgctggtgagcacaaccatcgcggcggtcggggcattgttgattgccctgctggtgattgtggcgctgtggcctgggccgaaatggcagcgtatgtgcgcccgtctgccgtggctgctcgccattccccatgtggcttttgccaccagcgcccttctgctctttgctgacggagggctgctttatgactatttcccgtatttcactccgccaatggaccgatttggcatcggtctgggcctcacccttgcagtgaaagaaagcgcatttctgctgtggatcttagcagcagtattgagcgaaaaatggctgttgcagcaggtcattgtgctggatagcctgggctacagccgctggcaatgcctgaactggctgctgttgccctccgtcgcgcctgcgctggcaatggcgatgctggcgattgttgcctggagcctgagcgtcgtggatgtggcaattattctcgggccaggtaatcccccgacgctggcggtaattagctggcagtggttaacccagggcgacattgaccaacaaacaaaaggcgcgcttgccagcctgctgttgatgctgttactcgccgcctacgttttgctgagctatctgctatggcgcagctggcggcgcactattccccgcgtagatggcgttcgcaagcctgccacgcctttattgccgggcaatacgctggcgatttttttacccttaaccggtgtgctgtgtgtggttctgctggcgatcctcgcggatcagagcacgatcaatagtgaagcgctcatcaacagcctgacaatggggctggtggcgacattcatcgctttgctcctgttactgctgtggctggaatgggggccacagcgtcgccagttgtggctatggttgcccattttattacctgctctgccactggtggcgggccagtacacgctggcgctatggctgaaactggatggaagctggacggcggtggtctgggggcatctgctgtgggtgatgccgtggatgctgtttatcctgcaacccgcctggcagcgcattgatagtcggttaattttgattgcgcaaacactgggctggagccgggccaaaatcttcttttacgtgaaatgcccactcatgttgcgccctgtgctgattgccttcgcggtgggatttgcagtcggtattgcgcagtatatgccaacgctgtggctgggcgcggggcgttttccgacgctcaccactgaggcggtggcattaagcagcggcggcagcaacggtattctcgccgcccaggctttatggcaactgctattaccgcttattatttttgccctgaccgcgttagtcgcaaaatgggtaggttatgtcagacaaggactccgctaatgctctgcgtgaaaaatgttagcctacgtttaccagaaagccgcttgctgacaaacgttaactttacggtggataaaggtgacattgtcacgttaatggggccgtctggctgtggaaaatccactctgtttagttggatgattggtgcactggccgaacagttttcttgtacaggtgagctatggctcaatgagcaacggattgacatcctacccaccgcacagcgtcagattggcattctttttcaggatgcactgttatttgaccagttcagtgtcgggcaaaatttactgctggcgctaccggcgacacttaaagggaatgcccgacgtaatgccgtgaatgatgcacttgagcgtagtggccttgagggagctttccatcaggatcctgccactttgtctggcggtcagcgagcgcgcgttgctctactacgcgcccttctcgcccaaccaaaagcgttactcctggatgagccattcagccgtcttgatgtggctctgcgcgataattttcgccagtgggtgttcagcgaagttcgcgccctggcgatccccgtcgttcaggtaacgcacgatctccaggatgttcctgctgatagttctgttctggatatggcgcagtggagtgaaaattacaacaaactgcgataacgcaaagtttttctcaatgcgtcagttcagaatggcgcactcaaaactacaatgtcgggattttcgatgaaacgtgtttctcaaatgaccgcgctggcaatggctttagggctggcttgcgcttctagctgggccgctgaactggcgaagcctcttacacttgaccagcttcaacaacaaaatggcaaagcgatagatactcgccccagcgcgttttataacggctggccacaaaccttaaatggcccttctggtcatgaacttgccgccttaaacctctctgccagctggcttgacaaaatgagcaccgaacagctcaacgcgtggatcaagcaacataacctgaaaaccgatgctccggtggcgctgtacggtaatgacaaagatgtcgacgccgtcaaaacgcgactgcaaaaagcaggtttaacgcatatctccatcctgagtgacgcgctaagcgaaccttcccgtctgcaaaaactgccgcattttgagcagctggtttatccgcaatggctgcacgacctgcaacaaggtaaagaggttacggcgaaacctgccggtgactggaaagtcattgaagcggcctggggcgctcctaagctttaccttatcagccatattcccggcgctgactacatcgataccaacgaagtggaaagtgaaccgctgtggaacaaagtttctgatgaacaactaaaagcgatgctggcaaaacacggcattcgccatgacaccacggtcattctgtatgggcgtgacgtatacgctgcagcgcgtgtggcgcagattatgctttatgctggtgtgaaagatgtgcgcctgctggatggcggctggcaaacctggtccgacgcgggactgcctgttgagcgcggaacgccaccgaaagtgaaagcggaaccggatttcggcgtgaagatcccggcacaaccgcagttgatgctcgatatggaacaggcccgtggactgctgcatcgccaggatgcaagcctggtgagcattcgtagctggccagaatttatcggtacgaccagcggttacagctatattaaaccaaaaggtgaaatagccggcgcacgttggggacacgctggtagcgacagcacgcatatggaagattttcataacccggatggcaccatgcgcagcgccgatgatattaccgctatgtggaaagcgtggaatatcaaaccagagcagcaagttagtttctactgcggcaccggctggcgcgcgtccgaaacctttatgtacgcacgcgccatgggttggaagaatgtttccgtgtatgacggcggctggtacgaatggagcagcgatccaaaaaatccggtagcaaccggtgaacgcggcccggacagtagcaaataacattgcaattactgacgctggaggctcttcagcgtcagatacccactccacacccgcgtaaaggtcgtcatccagcacaacgcaccgaagatccacgcaaaccacgcaaaccatgcagggaataaacatcccagcacaaacagtaagatcgtttctgtgccttcggttaatccccccagatagtaaaagctcttatgtgcataaccggggttatcaatctgatgttttgctgccagtgcagcaaaggcgagaaaactgctgcccgtgccgataaacgcaaacaacaaccagccgcctgccagcgcattttgctccggtgcagcaagaataaagccaaacggcaccagcgcgtaaaagagaaaatcgagagaaatatcaagaaagccgcccgcgtcggtaagctctctgcgccgcgccagcgcaccgtccagaccatcaagcagcctgttcaacaaaatgacgactagcgccgccagataccagcccagcgccagaaacggcagagccagcacgccgatggcaaatcccactaatgttaaaccatctggcgtaatgcccggtttatcaagaacccgcacgcactgatgcaacaacggtttaatccggggatgaagatggcggtctagcacaggcactccttaaatataaagcctttctgattgagcaacagtgcggatattatggcatttttcgcttatctgcccgtgtgtaatttatgaaaatgattgaagttgttgccgccatcattgaacgtgatggcaaaattttactcgcgcaacgccccgcccagagcgatcaggcgggattatgggagtttgccggtggtaaagtcgagccggatgaaagtcagcggcaggcgctggtgcgtgagttacgcgaagaactgggcatcgaagcaactgtgggtgaatatgttgccagccatcagcgagaagttagcgggcggattatccatcttcatgcctggcacgtacccgacttccacgggacgttacaggcacatgaacatcaggcgctggtctggtgcagtcctgaagaggcgctgcaatatccgctggcccctgctgacattccattattagaggcgtttatggctttacgcgccgccagaccagcggattaattatggctttacgcgccgccagaccagcggattagtgctaagggttttgtcatcacgctggcattgcagcagtattccttcggctttaattaccgccccttcagaataattttgatcctgataaacgcagcactgagtacagggctgcgcactctgcccgccactactgaacacttctggcggtacgtttacctccacgtccggacgataatgcgggttagccagtgcaattaatggaaatgctaatactacggcgaacaatgctcgactcacagggaactccttaacgttattgtctctgctactgataacggtagccgggtggcaaaactttagcgtctgagttatcgcatttggttatgagattactctcgttattaatttgctttcctgggtcatttttttcttgcttaccgtcacattcttgatggtatagtcgaaaactgcaaaagcacatgacataaacaacataagcacaatcgtattaatatataagggttttatatctatggatcagacatattctctggagagtttcctcaaccatgtccaaaagcgcgacccgaatcaaaccgagttcgcgcaagccgttcgtgaagtaatgaccacactctggccttttcttgaacaaaatccaaaatatcgccagatgagtttactggagcgtctggttgaaccggagcgcgtgatccagtttcgcgtggtatgggttgatgatcgcaaccagatacaggtcaaccgtgcatggcgtgtgcagttcagctctgccatcggcccgtacaaaggcggtatgcgcttccatccgagtgttaacctttccattctcaaattcctcggctttgaacaaaccttcaaaaatgccctgactactctgccgatgggcggtggtaaaggcggcagcgatttcgatccgaaaggaaaaagcgaaggtgaagtgatgcgtttttgccaggcgctgatgactgaactgtatcgccacctgggcgcggataccgacgttccggcaggtgatatcggggttggtggtcgtgaagtcggctttatggcggggatgatgaaaaagctctccaacaataccgcctgcgtcttcaccggtaagggccttagttttggcggcagtcttattcgcccggaagctaccggctacggtctggtttatttcacagaagcaatgctaaaacgccacggtatgggttttgaagggatgcgcgtttccgtttctggctccggcaacgtcgcccagtacgctatcgaaaaagcgatggaatttggtgctcgtgtgatcactgcgagtgactccagcggcactgtagttgatgaaagcggattcacgaaagagaaactggcacgtcttatcgaaatcaaagccagccgcgatggtcgagtggcagattacgccaaagaatttggtctggtctatctcgaaggccaacagccgtggtctctaccggttgatatcgccctgccttgcgccacccagaatgaactggatgttgacgccgcgcatcagcttatcgctaatggcgttaaagccgtcgccgaaggggcaaatatgccgaccaccatcgaagcgactgaactgttccagcaggcaggcgtactatttgcaccgggtaaagcggctaatgctggtggcgtcgctacaagcggcctggaaatggcacaaaacgctgcgcgcctgggctggaaagccgagaaagttgacgcacgtttgcatcacatcatgctggatatccaccatgcctgtgttgagcatggtggtgaaggtgagcaaaccaactacgtgcagggcgcgaacattgccggttttgtgaaggttgccgatgcgatgctggcgcagggtgtgatttaagttgtaaatgcctgatggcgctacgcttatcaggcctacaaatgggcacaattcattgcagttacgctctaatgtaggccgggcaagcgcagcgcccccggcaaaatttcaggcgtttaactgtatttaacggaacttgctccccacggaacatttcttatgggccaacggcatttcttactgtagtgctcccaaaactgcttgtcgtaacgataacacgcttcaagttcagcatccgttaactttctgcgatagcagcagatatgccagtaaagaaatcccatttgactatttttttgataatcttcttcgctttcgaacaactcgtgcgcctttcgagaagcaagcattatataatgccaggccagttcttcttcaattgtcccgttttgaaaagctgtgctacttatgctgatcatccaacttaattccgccgcccatattagcttcgcgctggatttaccggagctatgattagcgcaatcagagatatagtcactgggaaaaacagcaaatttattcaacaaggcgataacctgctctggggcttcctccatgtttgctttaaaggtattggctccatggtcgccagaaagaaaatgctccattaaggcacaataactttcgctatcttcgataccccattgatcctctaaagactcgcgtcttttacttatgatatcgatgctgtcaaaaggaagcacatgatattggaaggtatctttgccaggttcaggctttcgcggccagaactccagcgtttcagaccattgcttatgatagaatcgataaggtgcgatcaattgtagcgcctgtaacttctcgatactgagcggctcaatacctttagcctgataataatgcagttgttctttttttgctttaaaaccggcccgaacaataagccccatcataattaatagataaagaaaagagcatcccgcggtaatcaggcctctttcattcaaaccgttggatgttatcgctgcgaacacaaacattacagcgacaacacatgttaaataaaacccccacttacaaagcagcatggccttattttctttaatcatccgttcaaaattactattaaatatttcccagccattaaaagaatacttctcgctcccaggatggttttgtaataaaacttttttcatcacattccctgttattacatactttagaggcgataattttatccatgcaaaaaaaatatccaacgaattttcttgatccgctggatatttcagaatatgactcgaatagcacgaaagattcactcgcttacgctatcgccccgcttccgacttcatctgctggcggactttttttcgcactacgtttacgcggtgcagcctttttcttatcagcactgccaccactgcccggagccacaatgccgcgaaactgccgcaccggcgtacgtttggcttgatcaataagctgatatagcgtccccaccagcggctgcataaagtcctgatagcgacactgcttttcgctgatttgcgtcagcacgctttcccagtgcgcggtcatgtccggtcgcgtcgccatctccggcaggctatggaatagcgcttttccggcgtcggtggagtggatatagcgcccttttttggtcaggaaaccacgcttgaacaacagttcaataatcccggcacgcgttgcctctgtccccagaccatcggtcgcacggaggatctttttcagatctttatcctgcacaaagcgcgcgatcccggtcatcgcgctaagcagtgttgcatcggtaaaatggcgcggcggctgggtttgccgctctaccacttcacctttttcacacagcaactcatcgcctttcgccaccacaggcagtggcgtgccgtcgttttcttcatcgcgctctttgctgcctaacagcgtgcgccagcctgcttcagcaagaaaacgcgctttagcgacaaatttgcctttggcaatgtccagttcgataacacacttgcggaacaccgcatccgggcagaattgcatcagatactgacgggcaatcaggttatagaccttcgcttcgttctccgtcaggttgatcgcagaactccgtgcggtcggaatgatggcgtggtgcgcatcgacctttttgtcatcccaacagcggttgcgtatatctggatctaccactggctgcggcaacagatccggtgcatgaacactgatggcattcatcaccgcgtggcgtccggcaaaatgttcttctggcaaatagcgacaatcagaacgcggataagtgattagcttgtgcgtttcgtacagtttctggcagatatcaagcacgttctgcgcactcagaccaaaacgttttgccgcttcaatctgcaacgcactaaggctaaaaggcagcggcgcggattcactttcccgtttatcgttatagctggtgacaatagccggttgaccactaatgcggttaaccacatgctccgccagtggacgatgtaacaagcgcccttcttcatcctggtacggttcacacgcttcgctcggttgccagatagcggtaaaccgctcatcggcaggtgtcacgatatgtgctttgacttcaaagaagtctttcgccacgaagttttcaatctcttcatcgcggcgcaccaccagcccaagcacgggcgtctgcacgcgtcccacggaaagtacgccctgataaccggcattgcgaccgagaatggtatacgcacgggtcatattgatgccgtacagccagtcggcacgcgctcgcgccagcgcagaaacgcacagcggtacaaactcactgttggaacgaagacggtcgatcgcccgctcaaccgcctgcgggttcaggtcgtttatcaagcaacgctgtacctgctggcgcttttccggtgccagttgcagatagtccagcacttcatccaccagcaattgcccttcacgatccgggtccccggcgtgaacgatttcgctggcttcatgcaggaaccgtttgatgacgttaagttgtttggtcacggagggtcggggctgtaattgccacttttccgggacaatcggcaaatccgcaagattccagcgcgcatagcggctgtcgtaggcgtctggctgcgcctgctcaagcaggtgaccgatacaccaggtcaccacctgaccattaccgcactcgataaagccatcgcctttccggtgcggtttgggcaggacatcagcaatggcgcgcgccagactcggtttttcggcaataaacaaccgcattgaattaacgaatctcaaccatggcacgaccgccgcgcgctggcaccagttcgccaattgccgtcagttcaatgccaaactcggcggctgtagctttgacctcattttctgcttccggcatgaccgccagcagcaaaccgccagaagtttgcggatcacacagcagatcgcgcacttcacgcggcatttcacccatcagatgaccgtagctggcaaagttacgttcagtgccgccaggtactgcgcccaacttaatgtactcttcaacaccggggagtttcgggatcgcttcatagtcgacgcgtgcctgcacaccagccccctgacacatttcgctcaagtggcccagcagaccaaagcccgtaacgtcggtcatcgcttttacgccttcgatgttggcaaaggacgcgcctgcgatgttcatccggcacatcacttccgtcgccagtccctgatgttctggtttcaacagactttttttctcagccgtggtaagaacgccgatccccagcggtttcgtcaggaacagtttgcatccggcttgtgcggtactgtttttcttcacccgctcggtcggtacgatccccgttaccgccagaccaaaaatcggctccggcgcatcgatggagtgaccgccagccagcgcaatacccgcctgacgacatgcatagcgtccaccttcggtcacttcgcgggcaatttctggggaaagtttgttaatcggccagccgaggatcgcaatcgccataatcggtttgccccccatcgcgaagatatcgctgatggcgttagtcgccgcaatgcggccaaaatcgaaaggattatcaacgatcggcataaagaagtcggtggtactgataacgctggtgccattgcccagatcgtacaccgccgcatcgtcgcgggtttcattacccacaagcaaattcggatcaacaaacttcgcctgctcactatgcaggatggtttccaacacttttggggaaattttacagccgcaaccagctccgtggctgtattgggtcaaacgaatgctgttctcgctcatggacatctcctgtcaatgcaatccgggtatggtaaccctcattccgtgaagtgataagtgagagtgtctgaattcctgcgcctttgctcacaatccagacagtttcgcgacaattatcagaaataagttacaaacggcgtcgggtccgggacgttaatgctcgtagatgctttcagctgcggcgtaccgaggtagagaaaaccgacaattttatcctgctcacggcaaccgaatgcttcacgcactaccggactttcagttaatgcgccactgcgccagatgccgccaaacccctgggcaactgctgccatttgcatcgccatgaccgcgcatccggcagacatttcctgttcccagcgcgggactttatgattctcttcgcatttcgccaccaccgtgatgatgagcggtgcgcggaacggcgcattacgggctttgtcgatagctttgtcatcactaccggcagcaatcgccccctgttccagtacggcgctgaaacgctcgcgcccttccccttcaatcacaaaaaaatgccacggttgcatggacttatggtccggcgcacgcatacccgcacgcaggatgttttgcagttgttcacccgttggcgcgggttcagccaagcgggaggcgctacggcgattgatcaatagttcgagtgcatccatttgattaactcctgtcgtgatatttattcacaaaattaacacgagagtggattttgttacagcacagtccgcaattcctgctgacaagtaccggttgggtcattacgataaccacatctattgcgcctgtgacaggtgtgaccttaagttgggagaatacatgcgaaccctttggcgatttattgccggattttttaaatggacgtggcgtctgctgaatttcgtccgtgaaatggtacttaacctgttctttattttcctcgtactggttggtgtggggatttggatgcaggtcagtggtggtgatagcaaagaaacggccagtcgtggcgcactgctgctggacatttctggtgtgatcgtcgataaacccgacagttctcagcggtttagtaaattaagccgccagctgcttggtgccagttccgatcgtctgcaggaaaacagtctgtttgatatcgtcaacactattcgccaggcgaaggacgaccgcaatatcaccggtattgtgatggatctgaaaaacttcgcaggcggcgaccaaccgtctatgcagtacatcggcaaagctctgaaagagtttcgtgacagcgggaaaccggtttatgccgttggcgagaactacagccaggggcaatattatctcgccagtttcgccaataaaatttggctgtctccgcaaggcgtggttgatctgcacggctttgccaccaacggtctgtactacaaaagcttgctggataagctgaaagtttccacccatgtgttccgcgtgggtacgtataaatctgccgttgaaccgtttattcgtgatgatatgagtccggcagcccgcgaagctgacagccgctggattggtgagctgtggcaaaactatctgaatactgttgccgctaaccggcagatccctgctgagcaggtattccctggcgcgcaagggttgcttgagggtttaaccaaaaccggtggcgataccgcgaaatatgcactggaaaacaagctggtcgatgcactggcaagcagtgcggaaatcgaaaaagcactgaccaaagaattcggctggagtaagactgataaaaattatcgcgccatcagttattacgattacgcattgaaaacgccggcagataccggtgacagcatcggtgtcgtctttgctaatggcgcaattatggatggcgaggaaactcaggggaatgttggcggtgataccactgcggcacaaatccgcgacgctcgccttgacccgaaagtgaaagcgattgtcctgcgtgttaatagcccaggcggcagcgttaccgcgtctgaagtgattcgcgctgaactggcagcagcccgggcagcgggtaagcctgtggttgtaagcatgggcggcatggcggcatctggtggttactggatttccacgccagctaattacattgtggctaaccccagcaccctgaccggttctatcggtatcttcggcgtgatcaccaccgtagaaaatagtctggatagcattggtgttcatactgatggtgtcagtactagtccgctggcggatgtttctatcaccagggcactgccgccggaagcgcagctgatgatgcagttaagcattgagaatggctataaacgctttatcacgctggttgctgatgcgcgtcatagcacgccggagcagattgataaaattgcccagggccacgtctggaccggtcaggatgcaaaagctaacgggctggtcgatagtctcggggatttcgatgatgcggtcgccaaagcagcagagctggcaaaagtgaaacagtggcatctggaatattacgttgatgaaccgaccttcttcgacaaagtgatggacaacatgtctggttctgtccgggcaatgttgccagatgcgttccaggccatgttacctgcaccgctggccagcgtagcctctaccgttaaaagtgaaagtgacaagctggccgcgtttaatgacccacaaaaccgttatgcgttttgcctgacctgcgccaacatgcgttaagtcttgtactgagtggccgacagatcgtcggccacattattttttacgtcgacgaatcctcttcccgctgtttcgccccatatttccttatccgcatagtatcaggtgcgctccccctgcctcacgtatatacttttgctctttcgatatcattcatatcaatatcatgcaaaagaaaagtatttacgttgcctacacgggcgggaccatcgggatgcagcgttccgagcagggttatataccggtgagtggtcatctacaacgccaactggcgctgatgccggaattccatcgcccggagatgccagatttcaccattcatgaatatacgccgctgatggattctagtgatatgacgccggaagactggcagcatattgctgaagatattaaagcgcactatgacgactatgatggttttgtcattctgcacggcaccgacacgatggcgtataccgcctctgcgctgagcttcatgctcgagaatctcggtaaaccggtcattgtgacagggagtcaaatcccgctggctgagttacgctctgacggacaaattaatctgctgaatgcgttgtacgttgcggcgaattatccgatcaacgaagtaacgctctttttcaataaccgattgtatcgcggcaaccgcactaccaaagcccatgccgatggttttgatgcgtttgcctctccaaaccttcctccgttactggaagcaggtatccatattcgtcgtttgaatacgccacccgccccgcacggtgaaggggaattaatcgttcatccaatcaccccacaaccaattggcgtagtgacgatttatccagggatttctgctgacgtcgtgcgcaattttctgcgccaaccggtgaaagcattgattctgcgctcctatggcgtgggtaatgcgccacaaaacaaagccttcctgcaggaattacaagaagccagcgatcgcggtattgtggtggtcaacctgacacaatgtatgtccggtaaagtgaacatgggtggttatgccaccggtaacgccctcgcccatgccggcgtaattggcggtgcagatatgactgtagaagccacgctaaccaaactgcattacctgcttagccaggaactggatactgaaaccattcgcaaggccatgagccaaaacctgcgcggcgaactgacgccggatgattaaggagactgtaatgccccctcgcgccctgttactggtcgatttacaaaatgatttctgtgctggtggcgcgctcgccgtgccggaaggtgacagtacggtggatgtcgctaaccgcctgattgactggtgccagagccgcggtgaagcggttatcgccagtcaggactggcacccggcgaatcacggcagttttgccagtcagcacggtgtagagccttatacgccaggccaactcgacggtttgccacaaaccttctggccagatcactgtgtgcagaacagtgaaggcgcacaattacatccgttactgcaccaaaaagcgatcgcagcggtgttccataaaggcgaaaatcctttagttgacagttacagtgccttttttgataacggccgtcggcagaaaacctctctcgatgactggttacgcgatcatgaaatcgatgaattgatcgttatgggcctggctactgactattgcgtgaagtttaccgtgctggacgcgttacagttaggttataaggtaaacgtgattaccgatggttgtcgtggcgtgaatatccagccccaggacagtgcgcacgcgtttatggagatgagtgcagctggggcaacgctatatacgctggcagactgggaagagacacaggggtaattttacgctggcctacaattctgtactggcattgtaggccaaataaaacacgtcagtggcacatctggcaattgatgccatcaacgaaagatttaattcacctcagaaatctcttccaagctcaccttccgcgtttcgatgccaaaaatggagagaaccagcgcacagagcaataacataacaccaagtaccataaacaccgtgatgctcccataatgtgttaataatgccgcaacgccatagggcgtgaagactgcgacgatccgtccgacggcattaacgaaaccgctaccgcgcaggcgtaaatgcgttggccaaagctccgggatataaaccgcgctcgcgaagcaaacatacatgtataaaaagaagatcatcaccagtccatagattaaaatcgcccactctgtagtctgaatactatagatatagcctaacacggcaataataataagtaaggtggagccaaataaccgacgaggaaaatgatcaataattaatgccgcaataaatattcctaccggagcgccaatcataataacagcggtcattaatatacttttatcgacatcaatgccggagttaacaaatatggtcggtatccatacggtgatggtataaaggctaatgttcattgcaattaaaacagtaatcgcgactaatgtacgtcgtaacatttcacctttaaacaggagccagaaagtacccttgattactttaaccttgctgttgctctgatagctagtaagcgggggtaaacgaatactcttctctctttcaatttgctgctctacttcacgaagttggcattctgcacctgcgatttgccctttccctgccagccatcgtgggctctcgataaagtatttaccactgagaaaccaggctaacagtatgccaataccacccagcagaaacattattcgccaactaaaaaaagcgataaccaccacgcctatcgccgcagacagcatggggctccagttaccaacaaaactgagccgcgcggaccattttccacgcaccgtcgcggggataaactccgtaaaactggcatagccaaccataatcagcgcccccattcctgttcccatcaggaagcgaaagaagatgagccagtacatatcagggacaaaagcggcccctgttgcagcaataccgacgatgagaagatttatgcgaaacgccctgcgccgcccaaagtagtcaccaataaacccaccagtaagactgccgatgaaataaccaaacattaatgcgctggtaaaggcggcattgaggaaattattactccatccattgcttaccagctttgctaagacgacattaccggagtaactcaaaaaccctgttaataacagactaaagcttataataccaaatatacgataatgaaaccgggccaaaggcaagcggtccagtcttgcgccaatttgatcatattgttccattaggtgcctcggatttgctaaaaaggtagcaattgcggcaaattcacttgccgcatctttatcatcattttatttcaaggcgcaggaacaaataatattgacaacgtgtgcttaaattaccacaccagctggatattattgtctttgcaaaatgctatccactctgcacccggacttttatcagttattatgtaattaatatgactaaaatcagctaactggacaaaagctttgcgatcaaacttagagtgatcaaccaataacgcaacttctgtcgcctgacggatcattgtctttttgatttcagcttccgcttcattagagtccagcgcgccgctgttaatatcaagacctttacaactcattaccatgatatcgacatgatagcgcctgatgatctctttagtaattcttccttgcagactaagtgtatttttgtttagttccccacccgtactaacgactttaatttcactctgagccagaacatgaatcgcttccgcgctgttggttagcaacgtcaggccactacggtcctgtaacaatttgagcaattccattacggtactactggaatcggctgccatggtggttttattgtcgataaagggtagtgccttgcgtgcaataagctgcttctcttcataaaagctactagcgcgcttataaaaatggatattctccgtcaacatcgctgtatttaaaacagcaccaccataggttctggtcaaaaagccttcatcttccagcttctcaagatcgcggcgaatggtttcttcggttacctgaaaaatcccactcaaattactgactgtcacctttttatcgttggcaaccatttgcttaattgcctgaatcctgtcttttgccgccacgattacacccctgtatctttttacatcacattagcgcgattatcgcataaccgatgtttactttcaaaataacctgtttgaatcacagattttcatcacagttttcacagaaacagaggtgaatcgtgttgagtatttaacgctccagggcctctgccatttccctcatcaatgttgcgtctgcatcgcttaagttgatattcagtgccgcgacattttcgcgtacctgttccggtgcagtagccccactaagaatggagattaaatcactctgttttaatatccacgccagtgccagagtgggaattgtgcactgataacgagcacaaagtggctgccactgttcaagcatatcaatcactttcagcatgttttcacgctggaaccagactttatttgcccgagcgccgcccggaacgtaatcacgagtgatggtgccggtcaacaatccctgctctagcggggaataaacctgaaccacaatgccattatcacgacatagtggcagcagttcgttttccattgcccggtcgaggatactgtatttcgcctgaataatatccagttcaccatattgcagatactcgcggatatggtcagcatcgacgttagcagcgcctatagcgcgaattttcccttcagactttaactcattaagcactgcgacagtttcagcgatcggcgtaaaaaatggcggcacgctctgccagtgcgtcatgtagatatcgatgtaatcaatacccagacgttgcaagctcgctgctacctcttcgcggatagattccggggaaaggtttttatacaactgccgatcgccaactttgttgaataaacttccttttcgttcccagacaatgccgcatttggtttctactacaacctgttcacggggcagtttttttaacgcctgaccgacgataacttcactattgccaaagttatatcctggcgcagtatcaatcagattaatgccacaacgatgggcttcaagaatcgtatcaatacatatttgccgatcgagatcgccattccatgcaggaccgccgccaatggcccatgtccccaaccccattcggctaagcgtaatatccgttgtgcctaaaggtatctttttcatttgccttcattatccttcgtattcttccagcaattgttcgaccagctttctgttttttacgccggtggtggcaccgacgcttagaacgctgatagccgccgttgcattggcaaagcgtgcgcattcacgcagatttttgccttctaacagtgccgcaataaaaccactagcaaagttatcgcccgcgccaatggtgtcgatggcggttattcctgcgaccgccggcaccttcatcgtcatgtcaccacgcttgataaagcagccgtctttacccgttttaatcaccaccgtttttacgccgcacgcaagaaagcagtcagcaatttcatccagtgtctctttcccggtgagtaattttgcctcggcaaaattaggaaacagataatcgacataactcaatgcttcgcaaatatcatccagcgtttcattcaaccgcggtttgatcatatcggcacagataatcatctgccgggctttagcttgcgtaaaaatttctgttagcgctttaccatccaatagtggactgttgaaaatactggccagacttaataatttcgcctgagaaaaccgcgcaaaatcaacatcgtcaatattcaatttccacagactgccattacggtttgtgacaaacgtccgctcgccatcctccgtcaccagtccaacgttaatagaggtatctatgctgacgtcctgcttcaggctttgaatatcaatattctctttgcggcaatggtcgagaataaattgccctgcggcatctttaccaatacgactcattaatgctgtgcgatggcccagacgagaaataattgttgcttcatttattgcatcacccccggtggtcattgcgattctttcaagaggataagaatccacatcaaagatatttttactgaccggttgcaatggaatatcaacaatagcggcacctatacaaataacgtcgagattatccatatcattattccgctttgccatcagaaccgaacagtttaattttttccaatgcccgttcttttacagctttacgtacttcacgttctaaatgcaggaaaggctgatcctggttttctttcactgcaaccattgcggcctgacagagctccgtatgaatgttgattttcgcgatacccaagctaattgcagttttaatgtcggcatcactgatcccgcttgcaccgtgcaaaaccagcggaacagaaacggcatcgcgtacgcgtttgacgacctcaaagttcaattgtggctcactcgtataaaccccatgctggttgccgatggcgacagccaaactatcacagcccgtacgttcaacaaattcagccgcctggtcaggatcggtatagtgatagcccgccagcgcttcctcataaacggtttcattaccgacatgccctaattccgcctctaccggaatacccagcggatggaagaaatcgacagcctctttggttaaacgaatattttcttcgaaatcaaacgcggaagcatcacgcattaaactattcataccatgagtccaggcgttatgaataatctccatactccgaccatgatcccaatgagttattaccggcaccgttgctttttgtgccatacttaccatcatgtgagagaaatcttcaaaactggtgttaccgacaaaacctgtaccaaaagaaataataaccggggatttcgcttcttcggctgcgtcgataacgcccatcaacatttctgcattccatacgttaaaatgggcaattgcataatgtttatttgtggcatcgttttcccaatatctgatatctgcgagcatgttctgttctcccgtattaattaatcgctaattttaataacgcctttaataatgtcgcgtttgttgttaacactctcttcaaatgcctgttgtacatcccgataatcgtaaatatgcgtcaccatgcttttcacatcgaatcgcccactagaaatagcttcaatcgtgaccggataacgattggcatagcggaataccgtctggatagtgacttcgcgattgattttgaggaaattgattgcgctatcgccgggtacagtaccaacaatcataattttaccgccgcgcattaccagataaggtgcctgtttaacggtgaccgcagaacccgctgtttcgaaaacaatatctgcgcccatgtcttcggtaaattgctgacagcgtgcaatagtgtcttcttttgcgccgttaataaccactgtcgcaccaagctgttccgccattgccagacgtttttccagcacatcaacgacggcaatttccgttgctcccaggcatttgcacgcttgcaacgtcatcaaaccaatacaacctgctcccagaataattatcttcttacccggtttaacatctgccagcatcgcggcatgcatcccgactgcggcaggctccaccagcgccccttccatcgtgtccatattgtcgggcagtttgtaagtaaagctctccggatgacacagatagtgcgttaatgcgccgcggtagttgggttgtgtcgccataaaatcaacgtccgggcagatgttatatttgccttccagacagtaacgacagtgaccgcaaggaacgccaggttcgatatttacccgatcccccggtttaaatttgcgcacgcggcttcccacagccacaaccgtcccggcgcattcatgacccaggccaatttcttgatttgggtctttaggcggaataaacgggccactttcaaaaccatgtacatcactaccacaaataccgacatattctactttaatcaaaacttcatcttctttaggcactggtatttctgcactaataattttcattgtgcccggcacctgcaatattgctttactatttttcattttgaatccacccgtattatttattggctactgcatcaatacttaaactttcaacggagacacctttggtttcgattccaatggtggcgatagcaattgcgacaataatactaaccgcccccagaagaataaagactcccgtaacgccataactactgagcagcactgcaacggcataaggtgcggcaataccactgattcgccctaccgcattcgccagaccggagccacggagtttggcctctgtcggccagatttcagggacatacactgcgctggcatagcaaacgtacatatagacgaaagtaatcaggaagaaaccaatcaacgttatgagcaacatactggtttgcagactatagatatatccgagcaccgcaatcaggattaatagccccacacccattgttttacgcggaattttatccatcaccagcatggcaataaaaataccaaatggcgcgccaaacatactcatggtatttaaaacaatgctgtcttttaaattaatcccctgggtcatgaatattgttggcaaccagttaattagtgtgtactgcacaacgttcatggcaatcagcacacaagagcctaatatcacgcgtttcagtaatactcctgtcagtaaggcactatacggcaccgcttgtggcgctttaccgtcatcagcaataaccacaggcggcaaaggtttacccgtctggcgtatgacgccttcttctatactccgcatgactttctcggcttcctgataccgtccgcggctttccagccagcgcggggattcaggaaagtagcgccaggccagcgccgtagcgataaggctcaatattgcagggataagcagttgtacccgccagttccactctgcactaatcagcggcgtgagtcccatcgctatcaaactacagagcggataactccagttgccaataaaggaaacccgactactccacgttccacgatttctaccgggcatatattcggtgaaaccagcaaacagcgtaaccagtaaagctcccagcccaactcccatcacaaaacggcaggcaataaggaaatccatattcggactgaaagcaccgacaaccatgctggcaatatgaatggcctcatagaggatgaacgcatttctgcgaccggttttgtcgccaatgatgccgcccaccagcgcaccgagaaacattccggcggtcgtgattgcactgaatgtggctgtggtggaattatctgtccagcccaacgctttcagctgcgcgaggatcaagccaccaacggcattactccagcagacaagcaagccaaacgcgacgatggcaaacatactactatgccagcggcaatccggtaagcgatccagccgtgcaccacaatgcggttttgttatctgttccatgcgataacgttccttcaggagagtggttattcatcaaagtcgtaagtcatgatcactttgattgcggttttatcgaccatcgcatcaaacccttcgcgccattggctcaggccgatacgatgcgtgatcatcggtttgactttgatagcgccgctggctaatagcctgatagcgttacgccaactggtggagtcataggccatatgcccaatgatgcttttgttccaggcggtaatgtcattaatgctgaaatcaagaggtttgaagcccattccaacgcgtaccacttccccgttcgggcggagcatttcgatggcttgtttcagtgcgatattggcaccggagcattcaatcaccagtcccagattgtctttgccacaaatttgctggcagcgcgccaccacatcttcggtagaaccatttactactgccgtcgcacccagttcttttgcaaccgggaagcggaccgccacatcttcttgcagaccaacgacgacgatatttaccgcccccataattcgcgccatttgtacggagaacagcccgagtgggccagtgccgatgacgaccacatcctgaccaggaaggaatttgctttgctgcgcgatggatttgtaggcattacagatagggtcaagtacggctgcgtcctcataatcaacaccatcagggatttcccacaacgcatgacgatgaattttgagaatttcaccaggaaccagacaatatttggaaaaaccaccgccccaggtattattatccagaccaaggtttactttttctgtacaacacagaaaatcaccttgttcacaggccggacaaacaccgcaaacgtgaccgctgttatcgcttacgacgcgttgccccactttccagtctttgactttttcaccaacctgcgcaatacaacctgcgaactcatggccgcggatagagttaaactcatcagaaccgctatcgacattgtagtgcttcatgtctgcgccgcagattgccgcggctttaatttcaatcactacatcttccgggccacacatgggttgtgggacatcaatcatcttgtagccgccaaaggccttgccaaaccgagccagtgctttcattgcgtcatcctctgtgtttagttttgcttagatggccatcatacttacccacatgatttttgaggtcaacattaaatctgtaaaacacagataatgatctgcgttttacaactcagatcacaattacgcagaaaatggctgggtctgttacaggttgatggaaggcggggcgcaaaaagagcaaattcgagagggattaccggccaaataggtctgagacttaagttcaggagaagtcattcaggtgtgaacgggacggcaagagatcggactgggacttagccaggtcatggcgagataattgagatgagtcgtggggtcattgttggctatccccttcatagccgaggcaaaaaggggatgaaccacttacttaaacatggcaataggctttgcactgataccaaaatcttcttttaactgctgtttgctcttcatgaccatctgaccatttgtgtcaattgtcatatgctgtgcttcgatattatggcgggcttgccacagcatcaccagttgcaggcagttctctttttgttcctcggtcaacgcaacgccatcaggccatttccccagttcaacggcggtgctcaaacgctggtatacctcaggcatcatgctgttgataatgtcatcaagattcataatttttccgctcctgtggaataagttgctgaatcgttttttcaaccgttgatttcttcgccgttttcgccatcggtaaagcgtaaagaggcagagttaacacaataacgttcgcccgttggctgcggcccgtcggggaagacatgccccagatgggcatcacagttaccgcaacgaatttctatgcgctgcattccatgactcaagtctttgatataacgaatggattcttcacttaccggttcgtagaaactgggccagccacagccggaatcatacttggtttgggaatgaaacagcggggcatcgcagatcaaacagtgatatacgccgtcacgcttgttatgcagtaaacgacccgtaaatggcggctctgtcccatgattctgcgtcacgtaaaactgcatctcggacaaattttttttcagttcttctgcgctaggtttattagccatttgctcacatctcactttaatcgtgctcacattacgtgactgattctaacaaaacattaacaccaactggcaaaattttgtcctaaacttgatctcgacgaaatggctgcacctaaatcgtgatgaaaatcacatttttatcgtaattgccctttaaaattcggggcgccgaccccatgtggtctcaagcccaaaggaagagtgaggcgagtcagtcgcgtaatgcttaggcacaggattgatttgtcgcaatgattgacacgattccgcttgacgctgcgtaaggtttttgtaattttacaggcaaccttttattcactaacaaatagctggtggaatatatgactatcaaagtaggtatcaacggttttggccgtatcggtcgcattgttttccgtgctgctcagaaacgttctgacatcgagatcgttgcaatcaacgacctgttagacgctgattacatggcatacatgctgaaatatgactccactcacggccgtttcgacggtaccgttgaagtgaaagacggtcatctgatcgttaacggtaaaaaaatccgtgttaccgctgaacgtgatccggctaacctgaaatgggacgaagttggtgttgacgttgtcgctgaagcaactggtctgttcctgactgacgaaactgctcgtaaacacatcaccgctggtgcgaagaaagtggttatgactggtccgtctaaagacaacactccgatgttcgttaaaggcgctaacttcgacaaatatgctggccaggacatcgtttccaacgcttcctgcaccaccaactgcctggctccgctggctaaagttatcaacgataacttcggcatcatcgaaggtctgatgaccaccgttcacgctactaccgctactcagaaaaccgttgatggcccgtctcacaaagactggcgcggcggccgcggcgcttcccagaacatcatcccgtcctctaccggtgctgctaaagctgtaggtaaagtactgccagaactgaatggcaaactgactggtatggcgttccgcgttccgaccccgaacgtatctgtagttgacctgaccgttcgtctggaaaaagctgcaacttacgagcagatcaaagctgccgttaaagctgctgctgaaggcgaaatgaaaggcgttctgggctacaccgaagatgacgtagtatctaccgatttcaacggcgaagtttgcacttccgtgttcgatgctaaagctggtatcgctctgaacgacaacttcgtgaaactggtatcctggtacgacaacgaaaccggttactccaacaaagttctggacctgatcgctcacatctccaaataagttgagatgacactgtgatctaaaaagagcgacttcggtcgctcttttttttacctgataaaatgaagttaaaggactgcgtcatgattaagaaaatttttgcccttccggtcatcgaacaaatctcccctgtcctctcccgtcgtaaactggatgaactggacctcattgtggtcgatcatccccaggtaaaagcctcttttgcattacagggcgcacaccttctcagctggaaacctgcgggtgaagaagaagttctgtggttgagcaacaacacaccgttcaaaaatggcgtcgctattcgcggtggcgtaccggtttgctggccgtggtttggtccggcggcacaacaaggtctgcctgcgcacggttttgcccgcaacctgccgtggacgctgaaaagtcatcatgaagatgctgatggcgtagcgctgacttttgaattgacgcaaagcgaagagacgaaaaaattctggccgcacgactttacgctgttagcgcatttccgcgtgggtaaaacttgtgaaatcgatcttgaaagtcatggcgaatttgaaaccacctctgccctgcatacctactttaacgtgggtgatatcgctaaggtaagcgtcagtgggctgggcgatcgcttcattgataaagtgaatgacgcgaaagaaaatgtactgaccgatggtattcagaccttccctgaccgtaccgatcgcgtgtatctgaatccacaagattgcagcgtgattaatgatgaagcgctgaatcgtattatcgccgtaggccaccagcatcatctgaacgttgtcggctggaacccgggaccggcgcttagtattagcatgggcgatatgccggatgatggctacaaaacatttgtttgtgtagaaacggcttacgctagtgaaacgcaaaaagtgaccaaagagaaacctgcacatctggcgcaatccattcgcgttgcgaaacgttaatttacgttaatgttgtgtgccgggtgcaatgcatccggcacacaacatcacaccatatccagcgcagtttttccttttggtgccggatatgccttatccagcatagctaattccgcactagaaagttcgacctcaagcacagccgcattttgttggacatgggcaatcgtggccgcttttggaatcgccatcacaccctgatgactgatcacccacgccaacaatacttgtgccgcgctgatattgtgagcatgtgcaatttcgttgactaccgcgttttttaacagtccattgcgcaaccgcccggcctgggctaacggactgtaagccatcaccggcatctgctgttgctggcaccaggggagtagatcgtactcaattcctcgactaccgagatggtaaagcacctgattagtggcacactgatttccccccggcagctgccagagttcctgcatatcagcataatcaaggttagaaacgccccagcggcggatttttccctgggcgatcaatttttccatcgctgcgacagtctcttcaaaagcgaaactgccagaccagtgtaataagtaaagatcgagataatcagtattgagacggcgtaaactggcttcgcatgcatttatcgctttttgcccgccagcattccacggatagactttagagacgagaaagaccttctctcgcagaccggttaatgcttccccaaccaccttttcggcaccgccatcggcatacatttcggcggtatcaatgagggttaaaccgagttcaatgcccgcgcgtagtgcagcaacttctgttttgcgctgactggcatcttcgcccatataccatgttccctgccctacggctggcagactgacatcgccactaaattgaatcattttttgttgcattgtttcctcccaggtattgcaccaccgtaatgcaaaacagggcgtgacgccctgtttttatgcacaaaatgccctggaaagatgcattatcagaatttgtaggtgatcccggtagaaatcaggccagtccaggatttatccaccatcgggctgtcagtaacttcatcagacagacgggtgtagcgtgcggtaccgtaaacactccagtcgccgaggaagttgtagctggcgctcagctccaggtaagggctccagctgtcgttcgggttatagccacgcagaccgctgcgagcggactctttgcggcttacgccataatagtattcgttctggttttcgctgttccactgcacaccaatacccggagtcacggtcaggccaccgttggtgtaacgatacaaccaggccatatcccagacgatgccgttgctgttatccagggtatcgccagccagggtggtacgcaggtaaccgtactgggtaaagtgagcataagacagaccagccatcatggtgctcttacggtcatccaggtgacgcatttggtgatcgccactgtctttcgctttgaagtaaagcgggctccagtaagcggtaatactaagtttatccgttgcgtcattccacaggtagtaaccaccacctaagccacggaaccagaagttatcgccttcatagttgattaccggtactgggtaaacatcggtatcgtaatctttatatgggtgttcaacgacacctacgcctgcgcccagggaaaatttaccttcagcgtgcgctacgcctgcagacgttgcgataagcactccaagtgccagaagtttgagtttggtcacaattaatcattccttaaacaaatgtttagcgggcgacaaagtttacccgtcaatacatcgaaacccaacctttttacgttttcattttttaaagtaactgtttaattttcctgacgcggatgacaccgcgcttacagccaaatgaatttagcgttactggcgagcctggtctttacattaattatgcaaaatttatggatgagttgttgatatgccattgaaattaagaaagccgtgcaggcaagttttccatttgccatctacgcttaattttgaaggtgtatcaccgggcacgttgttctcatcgtcgataaaatggcatgagagttgctgtgttttagcaagagacgtcgttcagtttacctcttccgggagcctctactattcatatgaacggctcttaacctgtgctaaaaaacgaaaggacggcataccatgaatatattcgatcactatcgccagcgatatgaagctgccaaggacgaagagttcacactgcaggagtttcttaccacttgtcggcaagatcgcagtgcttatgccaacgcggctgagcggctattgatggctatcggtgagcctgtcatggtcgatacagcccaggaacccagactttctcgactcttttctaaccgggtcattgcacgttatccggcgtttgaagagttttacggcatggaagacgcgattgaacagattgtctcttatctgaaacacgcggctcaggggctggaagagaagaaacaaatcctgtatctgctggggcctgtgggtgggggtaaaagtagccttgctgagcgactgaaaagtttaatgcagctcgtaccgatttatgtattgagcgcgaacggtgagcgtagcccggtcaacgatcatccgttctgtcttttcaatccgcaggaagatgcgcagattctggaaaaagagtatggcattcctcgccgttatctcggcaccatcatgagcccgtgggcggcaaaacgcctgcatgaatttggtggcgatatcactaagttccgggtagtgaaggtctggccgagtattctgcaacaaattgctatcgccaaaacggaacccggcgatgagaacaaccaggacatctccgcgctggttgggaaagtcgatattcgtaaactcgaacactacgcgcagaatgacccggacgcctacggctattccggtgcgctgtgccgcgccaatcaggggatcatggaattcgttgagatgtttaaagcaccgattaaagtgctgcatcccttgttaaccgccactcaggaaggtaactacaacgggacggaaggtatctccgccctgccgttcaacgggattattctcgcacacagcaacgagtccgaatgggtcactttccgtaataacaaaaacaacgaagccttcctcgatcgtgtttacatcgtgaaggtgccgtattgcttgcgcatttccgaagagatcaaaatctacgagaaattgcttaatcacagtgaattgactcacgccccatgcgcccctggcacgctcgaaacactgagtcgtttttccattcttagccgcctgaaagagccagaaaactccagcatttatagtaagatgcgggtttatgatggcgaaagtctgaaagacaccgatcccaaagccaagagctatcaggaatatcgtgactacgccggtgtcgatgaagggatgaacggtctgagcacgcgttttgcgtttaagatcctctcccgcgtgttcaacttcgatcatgtagaagtggcagcaaacccggtccatctgttctacgtcctggaacagcagattgagcgcgagcagttcccacaagagcaggcagaacgctatctggagttcctgaaaggttatctgatcccgaaatatgccgagtttatcggcaaagagatccagacggcctaccttgaatcctattccgaatatgggcaaaacattttcgaccgttatgttacctacgcggatttctggattcaggatcaggagtatcgcgatccggataccgggcagctgtttgaccgcgagtctcttaacgccgagctggagaaaatcgagaaaccggcggggatcagtaatccaaaagatttccgcaacgagattgttaacttcgtactgcgcgccagagcgaataacagcggacgcaatccgaactggaccagctatgaaaaactgcgcacggtcatcgagaagaaaatgttctccaataccgaggagctgttgccggttatcagctttaacgccaaaacgagtaccgacgagcagaagaaacacgacgactttgtcgaccgtatgatggaaaaaggctacacccgtaaacaggtgcgtttactgtgcgaatggtatttgcgcgtacgtaaaagctcttaacaaccctggcccggtacacatgttaccgggcctacaacgacagcgaaccgtgggcctgagaagcggcaacacaggcgtagcatacagttggcaaatgtagtacggggggcatatgacctggtttattgaccggcgtctgaacggcaaaaacaaaagcatggtgaatcgccagcgttttttacgccgttataaagcgcaaattaaacagagcatctccgaggccattaataagcgtagcgtgactgacgtcgacagcggcgaatccgtatccattcccacggaagatattagcgaaccgatgtttcatcaggggcgtggcggtctgcgccaccgcgtgcatccgggcaatgaccatttcgtccagaacgaccgaattgaacgtccccagggtggcggcggaggttccggcagtggtcagggccaggccagccaggatggtgaaggtcaggatgaatttgtctttcagattagcaaagatgagtatcttgatctgctctttgaagatttggccttaccgaatctgaaacaaaaccaacaacgccagctgaccgaatataaaacgcatcgggcgggttataccgctaacggcgttccggccaatatcagcgttgtgcgtagtttgcagaacagtctggcgcgacgcacagccatgacggcaggcaagcggcgggaacttcatgcactggaagagaatttggccatcatcagcaacagtgaacctgcgcaactgctggaagaggaacgtctgcgcaaagaaattgcagaattacgtgccaaaattgaacgcgtcccttttattgacaccttcgatttacgttacaagaactacgagaagcggcccgatccctccagccaggcagtgatgttttgcctgatggacgtttccggtagtatggatcaatccactaaagatatggctaagcgtttttatattctgctgtatctgttcctcagcagaacgtataagaacgtggaagtcgtatacatccgccatcatacccaggcgaaagaagtcgatgaacatgagtttttctacagccaggaaacaggcggcaccattgtttccagcgccctgaaactgatggatgaggtagtgaaagagcgttataacccggcacagtggaatatttacgctgcacaagcaagcgacggcgataactgggccgatgactctccgctttgccatgaaatcctggcgaaaaaattattacctgttgttcgttattacagctatatcgaaattacccgtcgtgcacatcagacattgtggcgagaatatgagcatctgcaatctactttcgacaactttgcgatgcagcacatccgcgaccaggatgatatttatccggtgttccgtgaactgtttcataaacaaaatgcaacagctaaaggctaaaactatcagccaggtcattatcgcctggctgatttttagcttactgtaaattatctcatttattacatacattagcttacaatcgctttaaatatgacagcataacctttacataatttagttccagaaaacaatcattcggaaaaatgattcagagtacacgtatttccatggggttattctttaaatattttttaagcttaacgaaaattgatcctggtcaaaactatatatctctgccaagtataaaatccagcactcacattgctctcctttttatggtttctatgggtacacaaaaattaaaagctcaaagcttttttattttcagtttattgctgacgttaattttattttgcattactaccttatataacgaaaacacaaatgtaaaactcatcccacagatgaattacctgatggttgttgtggctttgtttttccttaacgccgtcatttttcttttcatgttaatgaaatatttcactaacaaacaaattttaccaacactcattttaagccttgcatttttaagtggccttatctatttagttgaaaccattgtaattatccataaaccaattaacggcagtacactgatccagacaaagagcaatgatgtttctattttctatattttccgccaactcagttttatttgtttaaccagcctggcgctcttttgttatggaaaagacaacatccttgacaacaataagaaaaaaacgggaatcctgttgctggcgctgatcccttttttagtttttccccttctggcacacaatctgagcagttataacgctgactattctttgtatgtcgtcgattactgtccggacaaccatactgcgacctggggaatcaactatacaaaaatattggtttgtctgtgggcatttttactgttctttattatcatgcgcacacgattagccagcgaactatggccgttaatagcattattatgtctggcaagcctatgctgcaacttacttctactgactctggatgagtataattatactatctggtatatcagtcgcgggattgaagtttccagtaaactgtttgttgtgtcttttctgatttataacattttcaggagctgcaactctccagcaaactggcagttcatgatgtgctgaccaatatttataatcggcgctactttttcaacagcgtagagagtttattgagccgacctgttgttaaggacttctgtgtcatgctggttgatattaatcagttcaaacgcatcaatgcccaatggggacatcgtgtgggtgataaagtgctggttagtattgtcgatattatccagcaaagcatccgccccgatgatattttagcgcgactggagggtgaggtgtttggcttgctatttaccgaactcaatagtgcccaggcaaaaatcattgcggaacgtatgcgtaaaaatgtcgaactcctgaccggctttagtaacagatatgatgttcctgaacaaatgaccatcagtattggcacggtttttagtacgggtgacacgcgtaatatcagccttgtcatgacggaagcagataaagccttacgcgaagcgaaaagcgaggggggcaacaaagtgattattcatcatatttaagtgcaaaaatattcagagccatgctttttgcgtggcttttgcatacaatttattactattacccctaaatttcccctccccagcggcgcagagatgagtataattagcgcccctgtgccaggccgcaatcgaactttatctggttttctcgtttcactaaccgaaggagatgcgtataaagcttccgatgagcgtttatatgtcaataagcagaacaaaaacagccgttcatgataaccttctgtggttgtttgcttgtaatctcaggagcgtgaaatgactgaaatggctaaaggaagcgtgacgcatcagcggttaatcgctttattaagtcaagaaggtgctgacttccgcgtcgttacccatgaagcggtaggtaaatgtgaagcggtgagtgaaattcgtggcaccgctctaggccagggtgctaaggcactggtatgtaaagtcaaaggcaatggcgtaaatcaacatgttctggcgatcctcgcagccgatcaacaggccgatctgagccaactcgccagccatataggcggattacgcgctagcttggccagcccggcggaagtcgatgaactcacaggctgtgtcttcggcgcgatcccccctttcagcttccatccaaaactcaaactggttgccgaccctctactcttcgaacgatttgatgaaatcgccttcaatgcaggcatgctggataaatccgttattttgaaaaccgcggattatttgcgcattgcgcaaccagaactggtcaatttccgccgcactgcgtaattagccggtccgttcgataagaagaacggacaaaaccagtacaacagcaatggcaaaaaagctactcgtgataatcagtgtctcgacaaacatttgatcgttcatagcatgcccccgggagatagctgttttcacgttattgttagcgtgcacaaatggcagtttgatgacagttcgcctgattttttatgcaaaaaacgtaaagattttctacttccttcctgcagcaagcgtaaagtaagcaggcttattattttttggcaaggaaaccacgatgtttgatgtcactttgctgatcctgctcgggttagctgcgctgggctttatcagtcataacaccactgtcgccgttagtattctggtgttaatcattgtccgcgtcacaccgttaagcaccttttttccgtggattgaaaaacaggggctaagtatcgggataatcattctgacgattggcgttatggcccccatcgccagcgggacgctaccgcccagtaccttgattcacagctttctgaactggaaaagtctggtggcgattgcagtaggcgtgattgtctcctggctgggtgggcgcggcgtgacgttaatgggcagccagccgcaactggtcgccgggctgctggtaggcactgttttaggcgtagcgctgtttcgcggcgtaccggttgggccgcttattgccgcgggtctggttagcctgattgtggggaaacagtaattattgccgcgggtctggtttcgcactttgtggggaaacagtagttaatctcgcaatatatcggcctggcgtttgccccaggcctttcttaaacatagtaataaaggccgttgtactatcataccccagcgtatgagcaactttctgtacagtatcgcctttcactaatccctgaagcgccataatcagctgtaactgctgacgccactggcgaaaactcaaccccgtctcttttactatcagtcgggcaagattgcgttcactcatcgcaaaaaagccagcccattgccccaatgccccccactcgacaggccctttcgccatcatctccaccatcgtgcggattttaggatgagaagaaacgggcaggtgcagctgttgttgtggctgctgagggagttcatcaaacaggacctgaattaatctgcgggtcattggctcagcacgctgagtcgtcgtcctgtttgccagggttaaaattaattcccggcataaggggcttattttcaatgtgcaacatgttgtcggcattgtcactgcgctgggttcgataaacagaaaacagagttcagcattagctgttacttgattgctatgttccaccccgcccggtatccaaaccgcatattgtggcggcaccatccacaaagcattttccaccgtacaggtaattgcaccatgtagcgccagtatcagctgtcctttgcggtgctgatgtacaggactggttaactcatccgttccggcgtgaatacaaaatgcgaccgcggcttcatggtgtcggtcgggttcatagccattgagattcaacctgtgcatcattttgtccgaacttagcgataatttgtcattttagcttgattcaacataacaataaaaacggtaaggtacagcctcgtttgtaacaatgagaagcatatgacctgtagtactagtttaagcggcaaaaacaggattgtccttatcgctggcattctgatgattgccacaacattacgcgtcacctttaccggcgcagcaccgttactggatacgattcgttccgcttacagcctgacgacagcgcaaaccggcttattgaccaccctgccattattggcctttgcgctaatcagtcctttggctgccccggtagcgcgacgttttggtatggaacgtagcctgtttgccgcgttacttttgatctgtgctggtatcgcaattcgctctctccctagcccttacttattatttggcggtacagcggtcattggcggtgggattgcattaggcaatgtcttactgccaggattaattaaacgcgatttccctcattccgtcgccagacttaccggcgcatattccctgacaatgggagctgcagcggcactgggaagcgctatggtcgtgccgctggctttgaacggttttggctggcaaggcgcgttgctcatgctgatgtgttttcctctgctggctctttttttatggctgccacagtggcgaagtcaacaacatgcaaatttgagtaccagccgcgccttacatactcggggtatctggcgtagtccgcttgcctggcaggtcacattgtttcttgggatcaacagtctggtctattacgtgattattggctggcttccggcgatcctcatcagtcacggctatagcgaagcacaggcgggtagtctgcatggtttgctgcaactagccacagcagcacccggtttgctgatcccacttttcttacatcatgtgaaagatcagcgtggtattgcagcgttcgttgccttgatgtgcgcagtgggcgcggttgggctctgctttatgccagcgcacgcgatcacctggactctgcttttcggttttggttccggcgcaacaatgatactggggttgacgttcattggtctgcgggctagttctgcgcatcaggcggcggcactcagcgggatggcacaatccgtcgggtatttgttggcagcctgtgggccgccgctgatgggtaaaatacacgatgctaacggtaactggtctgtaccacttatgggtgttgccatacttagtctactgatggcgattttcggactttgcgccgggagagacaaagaaattcgctaatatccggtgctatagtgacgtaacaaatcatgcgtgaaagggagaacaaacacgatgaatattcagtgcaaacgcgtttatgatccggctgaacagagcgatggttatcgcatactggtcgaccgcctctggccgcgcggtatcaaaaaaaccgatttagcccttgatgagtgggataaagaaatcacgccgagtacggaactgcgcaaagcctttcacggcgaagtcgtcgattatgcaacctttcgcgagcaatatcttgcagaactggcgcaacacgagcaagaaggaaagcggctggcggacatcgccaaaaaacagccgctgaccctgctctacagtgcaaaaaacaccacgcagaaccatgcgctggtgctggccgactggctacgtagcttgtgattttagtacagcatccggcggttatttttcaccagccggatggtcacgccgccacaatgcccattcatcaatcgtttcaccgcccggtaatttgcaattgttgctgaccccttgcgctgtctgcactggaatgagcgtcccgcccttctgctggcaatagacgctcgccggatttgccataccaatctgcggcggtttaggtgcttctggctgagaaggggtactacaaccagccaggaccagcaagcaaggcagaacaaaactgataattttcatttattgatctcacatatttatccaagattagagtatcgcggtatcgttttgttttgcagcactatttttattacattcactcaaaacatattacgtcttgtttcatctttgttgatgatgttttatcatgcctgcaaagattaaataatcagcatttacccgccgtatcctggagttgttccgtgagtgatcagattatcgcccgcgtcagccaatcccttgccaaagaacagagtctggaaagtctggtccgacagcttctggagatgctggaaatggtcactgatatggaaagtacctacctgaccaaagtggatgtcgaagcgcgcctgcagcatattatgtttgcccgtaacagccagaaaatgtacatcccggagaattttaccgtcagctgggattacagcttatgcaaacgcgccattgatgaaaactgctttttcagcgatgaagtccccgaccgttggggtgactgtattgcggcacgcaatcttggcatcaccacatttctgagcacgccaattcacttaccggatggaagtttctatggcacgctttgcgccgccagcagtgagaagcgccagtggagtgaacgcgcggaacaggttttacagttattcgccggactgattgcacaatatattcaaaaagaggcactggttgaacagctgcgcgaagccaatgctgcgctgattgcgcaaagctataccgacagcttaaccgggctaccgaatcggcgggcgatttttgaaaatctgacgacactgttttccctcgcccggcatcttaaccataagataatgatcgcgtttatcgatctggataacttcaaattaatcaatgatcgttttggtcataatagtggcgatctgtttctcattcaggttggcgagcgccttaatacgctccagcaaaatggcgaagttattggtcgtctcggcggtgatgagtttttagttgttagtctaaacaacgagaatgcggatattagcagcctgcgagaacgcattcagcagcaaatacgtggagaatatcacttaggtgatgttgatttgtattatcccggtgccagtcttggcatagtagaagtcgatcctgaaacaaccgatgcagacagtgccctgcatgctgccgatattgcgatgtatcaggagaaaaaacacaaacagaaaacaccttttgtcgcgcatccagcgctacattcctgaggcgtattcacatccttttgattggtgataacatgcgaatcggtattatttttccggttgtaatcttcattacagcggtcgtatttttagcatggttttttattggcggctatgctgccccgggagcataaagatgaaaaaaacaacgattattatgatgggtgtggcgattattgtcgtactcggcactgagctgggatggtggtaacgtcacctctaaaaaatagcaaaggctgcctgtgtgcagcctttgtgcaatttaagcgttaacttttaatcttcctgtagataaatagcacgacaatcgcaccaataacggcaaccacgaagctgccaaaattgaagccatcgactttaccaaagccaaacagcgtgctgatccatccgccgactacggcaccgactatccccagcaggatagtcataaagaatccacctccatctttacctggcatgatccacttcgccagaataccggcaataagcccaaaaataatccaactcagaatgcccattgtttcctcacttatctgttttgcattagcgggttagtcgctgataaaaagcatagcacaacatcgggagggcaagatttgtgacgagcatcacggaggttttttttgcgatggcgcagaaattgcgccatcaacgatcagtgataattaccaaccacaaacatcatgttcgttttccgtgtcataagaacgtacggtattcaccagatcttttatcacttcagccgccacttctggcaccagcaaagtcatcggcgtctctgtttcataatcgacagaaacgccattgctgttattggtgacggtcacggtatacgttgctttgcccatgattcatttcccgttatgaatgactttccgttgttgcgcaccttccatcaggacttcaggagccacgaagaagtcaatgttgaaataagtatcgtcagtcatggcttcaatgttgtgccacttttctggagggaacaccgcaaactgccccgcttcgataaggatcacctgatcaggctctgcactgtgttcatcagcgtagccgagatatttgaccgccccatgcataacggaaaggcgtgggtaaacccccgggcgcgttcctttatcaagatgacgttcgaatattccggcaggtgcagtttgtttattccagaaaggcgtactgcgcgtatgaatataattctgtgggatttgaagcatccttttccctccttcggtgaatgcgctgaaaacggtttattccagccgtttcagggtacgcctgataatttgcattttaaataccatttattggttactttttagcaccatatcagcgaagaatcagggaggattatagatgggaagcccgcgacaacgcgggctgaaagcatcaggattgcagcgtcgccagtcgggcagcgaaacccacgaacatcaaaccaatcagactgttgccaactttagccagtttctttttggtacgtatgtactgcgtgacaaaagcaccagatataatcaggaagctcaaatagcagaaactcaccagttccagcgtcgccgccagaataaagaaactaattcccgtatgtggggcattaacatcgataaactgtacgaaaaagctcacatagaacaaaatggctttcggattagtcaggctcaaaattaacgcgcgtttaaaaatagcaccgtattggggctcatcggatttggcctcgctatttttacccttcagggtcgcgtaaagaattttactccccagatagagcaaataaaacgcaccaagataacgtacaatgttgaataatatcggggtggtcttaattaatgtcgccactccagcccatgccagaaacatcaataccgcatcgccaataaatacaccgcaggccgcaagataaccgcctttcataccgctactgacgctatttttgagtacaaacagggtatttggccctggcaccaacacaataaaaatggccccaaccagataggtccagtaattcagaaccccgtattcagcgaacacattaacctctttaattatctttcgatcatgcgcgattaaaggtgaatatgctaaccaatctgtagcggcttagaaaggagaaaatcaggttttaacctgatatcaacccgataattgaatcattaatcaggcatgctccagactaaaattcgggtagtgctcggcaaaatactggcgtaaaaattctaccgttatccgcactttcgcactcgtcgccagcctactaacataaacggcccagacgttcgctggctggtaatattccggtagcacttgcactaaatgaccactggcaatgttttcgctaacatcccaccaggaacgcagagcaatcccctgcccatcgagacaccactgatggacaatttctccatgattagagctcagtgggccggtgactttaatcgcatgggggccttctttattgcgtaattgccagacaccaaaaggatgatcgcgctctttaatgaccaggcacggcaatgcagaaagatcggttaaatgtttcggcgcgccatgttgcgcaataaattccgggctcgcgcagagaatacggtaattggtcgccagtttgcgggcgattaaattaggggcgatgtcatcgccaatgcgaatatcgagatcgacaccttcattgaccaaatcgaccagtcggtcttccacatcaaaacgtaattccagttgcggatacgccttcgccagcgctaataacgccggagccaccacctgtcgtccaaaaccaaagctgctgataatacgcagcatcccctgcggcacctgacgcacgtcagaaagttcgtccatcatctgaccgacatcctgcaaaatccgctgcgcccattcataaatccgctctccttcttcggtaatggtgacgcggcgggtggtgcggtgtaacaacaccacgtttagcgtttgctccagcaaggcgatgcgcttgctgacgaacgccggactaacgcccagttcttccgccacggcggcaaaaccagcccggcgagccaccagcataaagacgcgcaaatcattcagcagcggtaaattattcatgattcgtgttttatgtttcaccagttacggggattaattccttttcagtcaattataggatggtgatgttgtcaattttgatggtcaggaagtgagaacccaatgatgaaaacgatgcgtattgctgcgatcccgggagacgggattggcaaagaagtccttcctgaagggattcgcgtgttacaggctgccgctgagcgctggggcttcgccttgagttttgagcaaatggagtgggcgagctgcgagtattacagccatcacggtaaaatgatgccggacgactggcatgagcaacttagccgtttcgacgccatctattttggtgccgtcggctggccggataccgttccggaccatattagcttgtggggtagcctgctgaaatttcgtcgtgaattcgaccagtacgtcaacctgcgcccggttcgtctctttcctggcgttccctgcccgctggcgggaaaacagcctggcgacatcgatttttacgtggtcagggaaaacaccgaaggcgaatattccagcctcggcggtagagtgaatgaaggtacagagcatgaagtcgtcattcaggaaagcgtatttacccgccgtggtgtcgatcgcattttgcgttatgccttcgaacttgcgcaaagccgtccacgtaagacactaacttctgccactaaaagcaacggtttagccatcagcatgccgtactgggatgagcgagtggaagcaatggccgagaattacccggagatccgctgggacaagcagcatattgatattctctgcgcgcgttttgtgatgcagccggaacgattcgatgtggtggtggcgtccaatttgtttggcgatatcctttccgatcttggcccggcctgcaccggcaccattggcattgccccatccgccaacctgaatccggaacgcactttcccgagcctcttcgagcctgtccacggttccgcgccggatatctacgggaaaaatattgctaaccctatcgccacgatttgggccggggcaatgatgctcgattttctcggcaatggcgatgagcgtttccagcaagcgcataacggtattctggcagcaattgaagaagtgattgctcacgggccgaaaacacctgatatgaaaggcaatgccaccacgccacaggttgccgacgcgatttgcaaaattattttgcgttaaggtcaaaccagtttatttgaaccgcgtcactgacgcggtttttttattcgttctttgcagtaaataacctgcgtcatttcaccttttattgtttccgtttcgtgttttatggctttccgtattcttaattgtttaatttatgtaacatgcaaattttgttacgcgtacgttaggttccgccgtacaggtattggttttgctggcaatgggactggtgatttatttagccaccagtaaatacggcaatattcgtcttggcgaaggaaaaccggaatacagcacgctctcctggctgtttatgtttatttgtgccggtttaggttcttctacgctttattggggggttgctgaatgggcctattattatcaaacacctggattaaatatcgcaccgcgtagtcaacaggcactcgaatttagcgttccctactctttcttccactggggcatcagcgcctgggcaacttatacgctggccagtttaatcatggcttatcactttcatgtgcggaaaaacaaaggtctgagcctttccggcattattgctgctattaccggcgttcgcccgcaaggcccatggggaaaactggtcgatttgatgttcctgatcgccactgtcggcgcactgaccatttcccttgttgttaccgcagcaacctttacccgtgggctttccgcgctgaccggtttacccgataacttcaccgtgcaggcatttgtgatcctgctttccggcggcattttttgcctaagcagctggattggtatcaacaacggtttgcaacgtctgagcaaaatggttggctggggcgcgttcctgctgccattactggtgctgattgtcggcccaaccgaatttattaccaacagcatcatcaatgccatcggcctgaccacgcaaaacttcctgcaaatgagcttattcaccgatccgcttggcgatggtagttttacccgcaactggaccgttttctactggctgtggtggatcagttacacccctggcgtagcaatgtttgtcacccgcgtttcccgcggtcgtaagattaaagaagttatctggggactgatcctcggcagcaccgtcggttgctggttcttctttggcgtaatggaaagctatgccattcatcagtttatcaatggcgtaatcaacgtcccacaggtgctggaaacactgggcggcgaaacagctgtacagcaagttctgatgagcttgccagccggtaaattgttcctcgccgcatacctgggcgtgatgattattttccttgccagccatatggatgcagtggcctacaccatggcggcgaccagtacgcgtaatctccaggaaggtgacgatcctgaccgtgggctgcgtcttttctggtgcgtggtgatcactctgatcccgctttccatcttgtttaccggtgctagcctggaaacgatgaaaaccaccgtcgtgctcacagcccttcccttcctcgtcattttactggtgaaagtcggcgggtttattcgctggctgaaacaggattacgccgacattccggctcatcaagttgaacattatctcccgcagacaccggttgaagccctggaaaaaacgccagtgctccctgcgggaaccgtattcaaaggcgacaactgagcgccatcatcctaacgataaaggtatccctatgagcaatctgagccctgactttgtactacccgaaaatttttgcgctaacccgcaagaggcgtggaccattcctgcccgtttttataccgatcagaacgcgtttgaacacgaaaaagagaacgtcttcgccaaaagctggatttgcgtcgctcacagcagcgaactggcgaatgccaatgattatgtgacgcgtgagatcattggcgaaagcatcgtgctggtacgcggtcgtgataaggttttgcgcgcgttctataacgtgtgtccgcaccgtggtcatcagttgttgagcggtgaaggaaaagcaaaaaatgtgattacctgcccgtatcacgcatgggcattcaaactcgatggcaacctggcccatgcacgtaactgcgaaaacgtcgccaatttcgatagcgacaaagcgcaactggttccggtgcgtctggaagaatatgccggattcgtcttcatcaacatggaccccaacgccaccagcgtagaagatcaattacccggcctgggcgcgaaagtgctggaagcctgcccggaagtccacgatctgaaactggcggcccgctttaccacccgcacgcctgccaactggaagaacattgtcgataactatctcgagtgctatcactgtggtccggcgcatccaggtttctccgactccgtacaggttgatcgttactggcacaccatgcacggtaactggacgctgcaatacggtttcgccaaaccgtccgaacagagctttaaatttgaagagggtacggatgcggcattccacggtttctggctgtggccgtgcacgatgctgaacgtcaccccgatcaaagggatgatgacggtcatttatgaattcccggtggattctgaaactaccctgcaaaactacgatatttacttcaccaatgaagagttaaccgacgagcaaaaaagcctgattgagtggtatcgcgatgtgttccgtccggaagatttacgtctggttgaaagcgtacagaaagggctgaaaagccgtggctatcgtggtcaggggcgcatcatggccgacagtagcggtagtggcatttccgaacatggtatcgcccatttccataatctgctggcgcaggtgtttaaggactaatgacatcggcggcggtattttccgccgctgggctgatttttgatggagtacagcaatgagtgactatcaaatgtttgaagtacaggtgagccaggttgaaccccttaccgaacaggtgaaacgcttcacgctggtggcaaccgatggcaaaccattacctgcgtttaccggaggaagtcacgtcattgtgcagatgagcgatggtgataaccagtacagcaatgcgtatagtctactgagtagcccgcatgacacctcttgttatcagattgccgttcggctggaggaaaacagccgcggcggttcccgctttttgcatcagcaggtaaaagtgggcgatcggttaacgattagtacgcctaataacctgtttgcgctaattcccagtgccagaaagcatctgtttatcgcgggcggtattggtatcacccctttcctgagccacatggcagagctgcaacacagcgacgtcgactggcagctacattactgcagccgaaatccagaaagttgcgcatttcgtgatgagctagtccagcatccgcaggctgagaaagtccatttgcatcatagtagtaccggaacacgactggaattagcgcgattattggcggatatcgaacctggcacacacgtttatacctgtggccccgaggcgctaattgaagcggtaagaagtgaagctgcgcgtctggacatcgccgccgatacgctgcactttgagcaatttgctatcgaagacaaaaccggcgatgcatttaccctggtgcttgcccgttccggaaaagagtttgtggtgccggaagagatgactattttgcaggttattgaaaataataaagccgcgaaagtggaatgtttatgtcgtgaaggggtatgcggaacctgcgaaacagcaatactggaaggtgaagctgaccatcgggatcaatattttagcgatgaagagcgtgccagccagcaaagtatgttgatctgttgtagccgtgcgaagggtaaacgcctggtgttggatttgtaatttgccgaagccggatgtggcgctgagcgcgcccagtccggcttcggaagattttactgcggatattcctgcaataaattgtgtaatgcttccgccatcagctcaccacgccagccggaaatcagctccggcaaattgttctgcggtttcagtttccagtgccagttcagcagttggttgatttgccgacggcttgccagcaattcggcgctgatcttatgcgtttcgctcacgtcagtaatcaggctcttaatcgctttaaacgctttacgataacccggcatgtccatcaggttaagcatcggctgcggtaaggcatcttccggcaatgtctgcgctttttccaccagcgctagcagcgttttaccgtgaaagcggatttcgctaccggataaacccaggctgtccagttcgcctaaacttcccggcatataacgcgctacgctccacaaatgctcttcacgcacgacaaagttcaccgccagatcgcgctctcgcgccttgcgcagtcgccagtcggctaacagttgcagacaggccagttggcgtgtgcgtaattgccaggcattggtgatatcacgccaggcatcttccggcgcaacgacttcctgacgacgcatttgcatcaggcggcattcatccagcgccgcaggtagccagccggaggcctccgtttctaccataagcttggcggtgatcggtaacagataccagacatccgccgctgcgtattcacactgacgttcggtcagcggtctggccagccagtcggtgcggctttcactcttgtccagcgtaacgccggaatactcttccaccatggaagcgaaaccccaactcatcgggcgtccgcagaaggcagcaaggatttgcgtgtcaatcaagggttgtggtaattcgccaaagacattgaggaacacttccagatcttcactgcctgcatggagaaattttgtgatggacggatcgcgcaggatcgctttcagcggactccagtcggtgatcccgagtggatcgattagcgccagatgctcgccatcgaaaagttgaatcaaccccagctgcgggtaataagtgcgcgtacgaacaaattcagtatccagggctatcgccggaaaggcacggacggcttcacacaaagaagccagcgcatcgtccgtggtaatcatttggtaattcaaattgttttctctttagtgggcgtcaaaaaaaacgccggattaaccggcgtctgacgactgacttaacgctcaggctttattgtccactttgccgcgcgcttcgtcacgtaattctcgtcgcaaaatttttccgacgttagatttcggtaactcatcacgaaactccaccagcttcggtactttgtatcccgtgagctgacggcggcaaaaagtcaccagactctcttcggtaaggcttggatcttttttcactacgaagattttcaccgcttcaccactggagccggaaggtacgccaacagccgcgacttcctgtacgccaggatgctgcatgacgacatcttcaatctcgttgggatagacgttaaaaccggaaaccagaatcatgtcttttttacgatcgacaatgcgcaggaatccttcttcatccattaccgcgatgtcgccggtgtgtaaccagccatttttgatgatttcatcggtagcatcgggacgctgccagtaacccagcatcacctgcggtcctttgacacaaagctcacccggttgacctggtggtacttcattatcatcatcatccaccagtttggcttccgtgctcggcaccggcaaaccgatgctaccactatgataatcaatatcatatgggttaacgctgaccagcggcgcacactcggtaaggccatagccttccagcagatactgtccggtcagtttcacccaacgctctgccaccacttgctgcactggcatcccaccgcctgcggaaagatgcagactggagaaatccagctgctggaactctttattgttcagcaacgcattgaacaaggtgttaacgcccgtgatagcggtaaacggatatttcgctaactcttttaccaaccctggaatatcgcgcgggttagtgataagcaggttctgcccacccagttcgataaacagcaggcagttaatggtcagggcaaaaatgtgatacagcggcagcgccgtcaccaccagctctttgcccggatgcaacagcggaccataggtcgcgttaacctgttccaggttcgccagcatattgcggtgagtcagcatcgcgcctttcgccacaccagtggtgccgccggtgtattgcagaaaagctaaatcttccggcaccagttcgggtttgacgtactgcatccggtagccgttatgcagtgcgctacgaaaactaatggcatctggcagatggtatttcggcaccaaacgcttgatgtatttaacaacgaaattgactaccgtgccttttgccgtagatagctgatcgcccatacgggtcagaattacgtgctgaacggcggttttatcaaccactttttccagtgtgtgagcaaagttagacacgataacaatcgcgcttgcgccgctatcgttaagctgatgctcaagctcacgcggggtatacaacgggttaacgtttacgacgatcatcccggcacgcaaaatgccaaacagcgccaccggatattgcaataaattaggcatcatcaacgcaacgcgatcgcctttcttcagccccaacccttgttgcaaataagcggcaaacgcgcgactgcgttcttccagcttgcggaaggtcattacctcccccatattcacaaacgcaggttgatcggcgtagcgcgcgacgctctgctcaaacatatctaccagagattgataacggtcagggttgatctccgtcggaacgtccgcgggataacggttaagccaaaccttcttcaattcttcacctctaaaatgcgtgttcgtcgtcatcgcaaccccaaatgatatacatgccgttaacataatattaactcatcataccagcttgataattacccaacgaaaaggttgcgaagcgcgtcactatttatttttatctttaccgtaagaatgcagaaacagcggaccagccgctgtttctttttctttaaaaacaagcaattattcagttacaactgtttgtactctcgcggggccgggattataccagccccatccgccgtagccatagggccagccacgaccgccataaaaccatggatcaatcggctgaggcggcataatcacctgctgggttaaatgccaacgtttgtaacccgttacttgcatcaccataaatttatagggcgtattgccgattttgccgtcaaccgcaccagtgattggcccgactaccgtaaccagttgtccacggaaatccaccgggtccagaaaaccgttcacatcggcataaatgcgaccgcgagaaggttctcccagcgtcggtctggctccgctgtccagcggtacggtagcaatttccaggcgagttttcccttgctggttttgtaccgcaaccactttgccaccaaagcgtgcctcctgaccaacgtacagctgcggcgcactcatcacccgaactaaatcttgttgcggcgtgggactgctgcctttaatggcgtccggcacagtgacacaaccgctcagcattagcgcaaacgtacctgccagtatgcctttgataacattcttttgaaccgccatggtgcgactcctttttttctcagggcatactcttaagattcattctttgcccggaagtttcttccatgcgacgttgttacgtaaataaaccggttcggcatgttccaccgccaccgttttaccctcagcaaacatctgacacgcaatcggcagcatatcttcagcagcaggcagtaacacttcgccatcgcgcaaaaccagcccgctctctttaccgagatccggccaagcttgccagcccgtccctaccgtcacccattcgccggaaagctgttgcattcgttcatggacgatttcgggtttgagtacggcttcggtttcttcaccgtgccagataccgttttcatcacgctgatattcggcccagtaaacttcgcccattcgcgcgtcaatggctgccagcacgcgggttgcgccgtttttgcgccacgccccttgcgccatcgtcattagcgtggagacgccaatcatcggtaattccgcgccaagcgccagcccttgcgcgatgccaataccaatgcgcacgccagtaaagctaccggggccgcgcccgtaagccagagcgttaatatcagtcagggaagttccgctggtggtcaggatatcctgcaccatcggtaagattcgttgagtatgttcacgagggcaaagctcaaaatgagcgttgacagtaccgtcgttccacagggcgacagagcaggcctctgtcgcggtatcgatagccagaattcgcatgggtcttcgtgcttagatcaataaaaaggcgcgcatcataccatactccgtaacaaattacctggaggatggtatcgcaaggaaacgaaccgcacgggcaatgtcacgggtgcgtggcgcgggcggcagactggcgagaaacgtcgcgccgtaaggacgcatcaccagccgattgtcacaaatcaccagcacgccacgatcgtcggcgtcgcgaatcagtcgccctaccccctgtttgagagtaatgacggcatctggtagttgcacttcatcgaacgggtcgccaccgcgcaaacgacaatcttccatgcgcgcttttaacagtggatcatccgggctggtaaacggcaatttgtcgataattaccaaactcaatgtatcgccacgcacgtccaccccttcccagaaactgctggttgccacaagaagcgcattaccggcgctgacaaattgctgcaacagttgccctttgctggtttccccctgcaacaatacaggaagcgtcatggtagcgcggaactgctcggccagatcgcgcatcatggcgtggctggtacaaagcataaaacaacgaccgttgttagcttcgatgatcggtcgcagcattgccgctaactggcgagcagaacctggctggttggtttgcggcagattgcgcagcacacagagtaacgcctggcggctgtaatcaaatgggctgggcaacagcaagctctcggcctgttcgatgccaagccggctggtgaaatgatgcagatcgtcgttcacgctcagcgttgcactggtgaagatccagctaccgggtttttgcgccattaactctttgaatttatccgccacgctgagcggcgtgagagccagagtaaaatggcggctagtgcattcgtaccagtagctgtagcccggctgattgatctcttttagccgcttcagccgtgtgcgatacaacgtggcgcgctcaaatgccgcatccagcaaggcggaacgccccagactcagtttcgccacgtcataacaaagttccagggtgtcatcgagcagtaaaaatgcccgctgaatttgcggattagctaacagctcacgcaggttaccgcgataacctggctcaccgagttgcagacgaaaatcctgcgcactctgggcaagacgatcagcgcacttttgtaactgctgggtgtcttttaattcggtgcggtaggcgatggtgatgtcttttgccaggtcgagcagttgtcgactggagagactctgaccaaaatactggctggcaatgtccggtagctggtgggcttcgtcgaagatcatgacgtccgcttccgggatcagttcgccaaatccactctctttaaccaccatatccgccagaaagagatgatggtttaccaccaccacatcggcgtccatcgcttttttacgtgctttgaccacaaagcaatctttatacatcgggcagtcgctgccaagacagttgtcgttggtgctggtgaccagcggccacgcctgactatcttccgccacgctgacgcaggtgctgatatcaccatcgactgtttgattagaccaggagcgcagcaggatcacatcgcttaagatttgtaccggcagatcgccccccgccagcgcctgctgttcgagacgttcgaggcagaggtagttactgcgccctttcagcagcgccacgttgcccgtatatttcaatgccttactgactgttggcaaatcgcggctgtagagctgatcctgcaacgctttactgccggtgctgataatgactttctttttcgcccgcagcgcaggagccaggtaagcgtaggttttgcccgtaccggttcctgcttccaccaccagcggctggcctttttctatcgcctgggtgacggctaccgccatctgtcgctgtggttctcgcggcttaaagcctggtatcgctttcgccagctgaccgtctggtgcaaaatcgtccgtcacactaccccctgttgatttgaacagggattatgtcaggatgagggcgctttcgccagttgaagtggtgacggcgacctcacattgtggcagtctttgcagcacgaaaatggaagtataatgaggacaaaatgatgactatcgttcgtatcgatgctgaagcccgctggtctgatgtagtaatccacaacaacacgctctactacactggtgtaccggaaaacctcgacgccgatgcctttgagcaaaccgccaacacgctggcacagattgacgccgtgctggaaaaacagggcagcaataaaagcagcattctggatgccaccattttcctggccgataaaaacgacttcgcggcgatgaataaagcgtgggatgcttgggttgtcgcgggtcatgcgccggtgcgctgcacggtacaagcgggtttgatgaacccgaagtataaagttgaaattaagattgtggctgcggtgtaagctttatcgaagcaaaataagtcagacgataatttatcgataatactggtcggttttacataaatcgaccagagaataagatattactgttgatgcttctgctaattcattatttatatttataatttcaattttatctataaaactaactatataaataaacataaacatgccgttgtgttcgccctttgattagcaactctggttttctttcttagctgaacaatctggttatagcgtgcggactgaccgttaaatttctccatcttactggataacacaccatgagctgctacctttaaaacacctgaatgtcaacaggttaactcgtgccatatcgttataatccctttgatattagatgcaaattaaggtcatatatagccttatcgataacatggttaattttaaggataagaatatgcctgctgtaatagataaagccctggatttcattggtgccatggatgtaagtgcgccaacaccaagtagcatgaatgaaagcacggcgaagggaatctttaaatatttaaaagaactgggagtacccgcgagtgccgctgatattacggcgcgagctgaccaggaaggctggaaccctgggttcacggaaaaaatggttggatgggcaaaaaaaatggagacaggtgaacgttctgtgattaaaaatcctgaatactttagtacatatatgcaggaagaactaaaagcactggtctgagttaaatttatatcagcataaatgggtcaggacgcttttaatcacatataaaaagcgtcctttttctcacaatcaaatgatcatcggcttctataacgaaatcgatacggattagtgtgttactcgtcttcatcctcaaaacgcgccacgattcgctcgccggagtggttggcacgcagctcttctgccaccagcgcgattgcctggccgctgctcatcccttgtgccatcagttcctggatccgctcgacagctttttgctgctgttcatgggtgagactaggtaaacctgcaaacattgttaactcctgctaaattgttggcgctaattatttcatgctacccggcacatagccagtagagtcaggactgatgaagacgttatctcccgctgtgattactttactctggcgtcaggacgccgctgaattttatttctcccgcttaagccacctgccgtgggcgatgcttttacactccggctatgccgatcatccgtatagccgctttgatattgtggtcgccgagccgatttgcactttaaccactttcggtaaagaaaccgttgttagtgaaagcgaaaaacgcacaacgaccactgatgacccgctacaggtgctccagcaggtgctggatcgcgcagacattcgcccaacgcataacgaagatttgccatttcagggcggcgcactggggttgtttggctacgatctgggccgccgttttgagagtctgccagaaattgcggaacaagatatcgttctgccggatatggcagtgggtatctacgattgggcgctcattgtcgaccaccagcgtcatacagtttctttgctgagtcataatgatgtcaatgcccgtcgggcctggctggaaagccagcaattcagcccgcaggaagatttcacgctcacttccgactggcaatccaatatgacccgcgagcagtacggcgaaaaatttcgccaggtacaggaatatctgcacagcggtgattgctatcaggtgaatctcgcccaacgttttcatgcgacctattctggcgatgaatggcaggcattccttcagcttaatcaggccaaccgcgcgccatttagcgcttttttacgtcttgaacagggtgcaattttaagccttagcccagagcggtttattctttgtgataatagtgaaatccagacccgcccgattaaaggcacgctaccacgcctgcccgatcctcaggaagatagcaaacaagcagtaaaactggcgaacagtgcgaaagatcgtgccgaaaatctgatgattgtcgatttaatgcgtaatgatatcggtcgtgttgccgtagcaggtagcgtaaaagtaccagagctgttcgtggtggaacccttccctgccgtgcatcatctggtcagcaccataacggcgcaactaccagaacagttacacgccagcgatctgctgcgcgcagcttttcctggtggcagtataaccggggctccgaaagtacgggctatggaaattatcgacgaactggaaccgcagcgacgcaatgcctggtgcggcagcattggctatttgagcttttgcggcaacatggataccagtattactatccgcacgctgactgccattaacggacaaattttctgctctgcgggcggtggaattgtcgccgatagccaggaagaagcggaatatcaggaaacttttgataaagttaatcgtatcctgaagcaactggagaagtaagacgtggaataccgtagcctgacgcttgatgattttttaagccgctttcaacttttgcgcccgcaaattaaccgggaaaccctaaatcatcgtcaggctgctgtgttaatccccatcgtccgtcgaccgcaaccggggttgttgctgactcagcgtagcattcatctgcgtaaacacgctggacaagtggcattccctggaggtgcagtcgatgacacggacgcaagtgctatcgccgccgcgctgcgcgaagctgaagaagaggtcgctataccgccttccgccgttgaagttatcggcgtgctgccgcccgtcgatagcgtcactggctaccaggtaaccccagtggtcggcattatcccgcccgatctgccgtatcgcgccagtgaagatgaagtcagcgcggtgtttgaaatgccgctcgcccaggcattacatctgggtcgttatcaccctttagatatctaccgccgtggtgatagtcatcgggtatggctgtcctggtacgaacagtattttgtatggggaatgaccgcaggcataattcgtgagctggcgctgcaaattggtgtgaaaccctgactatacttatctttacatctacaaaacactacttgagacaatcatcgcaatattagttaaatcgcggtttttgattagtttaattcatgtgaatagttaagccagtcgccgcgttccctcttacactatgcgctgttattagttcgttactggaagtccagtcaccttgtcaggagtattatcgtgattagtctattcgacatgtttaaggtggggattggtcccagttcttcccataccgtagggcctatgaaggcaggtaaacagttcgtcgatgatctggtcgaaaaaggcttactggatagcgttactcgcgttgccgtggacgtttatggtagtctgagcctgacgggtaaaggccaccacaccgatatcgccattattatgggtcttgcaggtaacgaacctgccaccgtggatatcgacagtattcccggttttattcgcgacgtagaagagcgcgaacgtctgctgctggcacagggacggcatgaagtggatttcccgcgcgacaacgggatgcgttttcataacggcaacctgccgctgcatgaaaacggtatgcaaatccacgcctataacggcgatgaagtcgtctacagcaaaacttattattccatcggcggcggttttatcgtcgatgaagaacactttggtcaggatgctgccaacgaagtaagcgtgccgtatccgttcaaatctgccaccgaactgctcgcgtactgtaatgaaaccggctatagcctgtctggtctcgctatgcagaacgaactggcgctgcacagcaagaaagagatcgacgagtatttcgcgcatgtctggcaaaccatgcaggcatgtatcgatcgcgggatgaacaccgaaggtgtactgccaggcccgctgcgcgtgccacgtcgtgcgtctgccctgcgccggatgctggtttccagcgataaactgtctaacgatccgatgaatgtcattgactgggtaaacatgtttgcgctggcagttaacgaagaaaacgccgccggtggtcgtgtggtaactgcgccaaccaacggtgcctgcggtatcgttccggcagtgctggcttactatgaccactttattgaaagcgtcagcccggacatctatacccgttactttatggcagcgggcgcgattggtgcattgtataaaatgaacgcctctatttccggtgcggaagttggttgccagggcgaagtgggtgttgcctgtagtatggctgctgcgggtcttgcagaactgctgggcggtagcccggaacaggtttgcgtggcggcggaaattggcatggaacacaaccttggtttaacctgcgacccggttgcagggcaggttcaggtgccgtgcattgagcgtaatgccattgcctctgtgaaggcgattaacgccgcgcggatggctctgcgccgcaccagtgcaccgcgcgtcagcctggataaggtcatcgaaacgatgtacgaaaccggtaaggatatgaacgccaaataccgcgaaaccagtcgcggtggtctggcaatcaaagtccagtgtgactaatacttcttactcgcccatctgcaacggatgggcgaatttatacccgctttctcgtctgctgtaatattccccactacacttccactgttgcgtcaggcgtttgtcgccatacgcttacagggtggcccgcatgcaaaaagcacaacggatcattaaaacctatcgtcgtaatcgaatgattgtttgtacgatttgcgcactcgttacgctcgctagcaccctgagcgtgcgatttattagtcagcgtaacttaaatcaacaacgggtagtacaattcgccaatcacgctgtagaggaattagataaagtactgcttcccctacaggcaggtagcgaagtcttgcttccgctgattggtctgccctgctctgtcgcccatttgccattacgtaaacaggcggcaaaactccaaactgtgcgatccattggcctggtgcaagacggcacactttattgctccagcatttttggttatcgcaatgtgcccgtcgtggacattctggctgaacttcctgcaccgcaaccacttttacgcctgacgatcgaccgtgccctgattaaaggcagtccggttttgattcaatggacgcctgcagcgggcagtagcaatgctggggtcatggagatgattaacatcgacttactgacggcaatgctgcttgagccacaactgccgcaaatcagtagcgccagcctgacggtggacaaacggcatttgctctatggtaatgggctggtagattcccttccgcaacctgaagacaatgaaaactatcaggtttctagccaacgctttccttttaccattaacgttaatggtccgggggctacggcgctggcatggcactatcttccaacacaattaccgctggcggtgctgctaagtttactggtgggctacatcgcctggctggcgaccgcttaccgaatgagcttttcccgcgaaatcaatctgggcctggcgcaacatgagttcgaattgttctgtcagcctttgcttaatgcgcgcagccagcaatgtattggtgtagagattttgctgcgctggaacaatccgcgtcagggctggattagtccggatgtgtttattcctatcgcggaagaacatcatttaattgtgccactgacccgctatgtgatggcagaaaccattcgtcagcgccatgttttcccgatgagtagtcagtttcatgttggcattaacgtcgcacccagccattttcgccgtggtgtgctgataaaagatctcaatcagtactggtttagcgctcacccgattcagcaactgatcctcgaaatcaccgaacgcgatgccttactggatgttgattatcggattgcccgcgagctgcatcgtaaaaacgtcaaactggcgattgatgacttcggcaccggcaacagcagcttttcctggcttgaaacattacgtcctgacgtgctgaaaattgataagagttttaccgcagctataggttctgacgcggttaacagcacggtgaccgatatcatcatcgcgctggggcaaagactgaatattgaactggtggcggagggcgtggaaacgcaagaacaggcgaagtatttgcgccgtcatggcgtgcatattttgcaagggtatttgtacgcacagccgatgccgctacgtgattttcccaaatggctggcgggcagccaaccgccgcccgcccggcataatggacatatcacgcccattatgccgttacgttaacgcttactcatcttcatcgtgcgccggttgctctttaacaatgcgaaccagatcaacacgataatcattggcttcaatgatggtgatatgcagtggccctacatcaatcacatcgcccacacggggaatgtgaccatttgcgctgatcacgaggcccgcgaccgtcgcgatatcatcgtcatcggcaaggtgctcaacatcaagcgcctgctgcaaggcatgcaaatctgtaccgccttttaccagccagccgtcaccatcagtaatgatttccggcgtttcgtcagcgtccgggaattcacccgcaatggcttccagcacatccagcggcgtgaccagaccttgtaccacaccaaactcgttggtcacgataacaaagctcccgcgagcacgacgcagcacgcccaacaggttgatcggatcgagggtttccgggacgataatcgccggagacgcgctagcaatcgccgccacatcaacgccctcttccagcgccaccagcagttctttagcacgtacaataccgatgatttcatccagttcaccgcgacataccgggaacagactgtgcggactagagagcagttgctcgcggatttcatcgaccccgagattagcgtcaacccagcttatttcaccgcgcggcgtcatgatcccgcgcagagaacggctcgccagcgtcagtacgccgttaatcatgtaacgttcttcttcggcaaatgcaccttccgggatcggcatcggcatcgggttatcggcatcgtgctgaacattggcctgacgtttcccgcccatcaaacgcaggatggcatcggcagtacgcgctcgcagcggcaaagtgctctggtggcgaataaagttgcgacgcgcaatctggttaaacacttcgatgatgatgctgaagccaatcgcggcatacaggtaacctttcggaatgtggaaaccgaaaccttctgccaccagactcagaccaatcattaacaggaagctcagacagagcaccaccaccgtggggtgctggttaacgaatcgcgtcagcggtttggatgccagcaacataaccgccatcgcaatcactaccgccgccatcatcaccggcagatggttaaccatccctactgcagtaattaccgcatccaagctgaagacggcgtcaaggatgacaatctgtgtgacgaccacccagaaactggcgtagcctttaccgtggccggaatcatgatcgcggttttccagccgttcatgcagttcggttgttgctttgaacagcaagaatatccccccgaacaacataatcaggtcgcgtccggagaaggagaaatccatgacggtaaatagcggtttggtcagcgtgaccatccaactaatcaggctcagcagccccagacgcataatcagcgccagacttaaccccagcaaacgcgctttatcgcgttgttttggcggcagtttgtcagcaagaatggcgatgaagaccaggttatcgatacccagcacaatttcgagaacaacaagcgtgagtagccccgcccaaatactggggtccattaagaattccatgacaagctcctgcttaaggaatagctattcgacgccagaaataatgcaggcgtaacgacaaaatgcaaacgaaaggtgcggcatagagtgccagaaaggcaggcgttaaaaggcctgatgctgaaatgacgtcggtgacgatccatactgcgggctactgccctatactccatggttgttaaacgggagttaaacatatcagagacgcctctgatttggcaaagatttaccttcctttgcaaacgaatgtgacaaggatattttacctttcgaaatttctgctaatcgaaagttaaattacggatcttcatcacataaaataattttttcgatatctaaaataaatcgcgaaacgcaggggtttttggttgtagcccttatctgaatcgattcgattgtggacgacgattcaaaaatacatctggcacgttgaggtgttaacgataataaaggaggtagcaagtgaccattgctattgttataggcacacatggttgggctgcagagcagttgcttaaaacggcagaaatgctgttaggcgagcaggaaaacgtcggctggatcgatttcgttccaggtgaaaatgccgaaacgctgattgaaaagtacaacgctcagttggcaaaactcgacaccactaaaggcgtgctgtttctcgttgatacatggggaggcagcccgttcaatgctgccagccgcattgtcgtcgacaaagagcattatgaagtcattgcaggcgttaacattccaatgctcgtggaaacgttaatggcccgtgatgatgacccaagctttgatgaactggtggcactggcagtagaaacaggccgtgaaggcgtgaaagcactgaaagccaaaccggttgaaaaagccgcgccagcacccgctgccgcagcaccaaaagcggctccaactccggcaaaaccaatggggccaaacgactacatggttattggccttgcgcgtatcgacgaccgtctgattcacggtcaggtcgccacccgctggaccaaagaaaccaatgtctcccgtattattgttgttagtgatgaagtggctgcggataccgttcgtaagacactgctcacccaggttgcacctccgggcgtaacagcacacgtagttgatgttgccaaaatgattcgcgtctacaacaacccgaaatatgctggcgaacgcgtaatgctgttatttaccaacccaacagatgtagagcgtctcgttgaaggcggcgtgaaaatcacctctgttaacgtcggtggtatggcattccgtcagggtaaaacccaggtgaataacgcggttagcgttgatgaaaaagatatcgaggcgttcaagaaactgaatgcgcgcggtattgagctggaagtccgtaaggtttccaccgatccgaaactgaaaatgatggatctgatcagcaaaatcgataagtaacgtattgtgttgattatcactcagttttcacacttaagtcttacgtaaacaggagaagtacaatggagattaccactcttcaaattgtgctggtatttatcgtagcctgtatcgcaggtatgggaagtatcctcgatgaatttcagtttcaccgtccgctaatcgcgtgtaccctggtgggtatcgttcttggggatatgaaaaccggtattattatcggtggtacgctggaaatgatcgcgctgggctggatgaacatcggtgctgcagttgcgcctgacgccgctctggcttctatcatttctaccattctggttatcgcaggtcatcagagcattggtgcaggtatcgcactggcaatccctctggccgctgcgggccaggtactgaccatcatcgttcgtactattaccgttgctttccagcacgctgcggataaggctgctgataacggcaacctgacagcgatttcctggatccacgtttcttctctgttcctgcaagcaatgcgtgtggctattccggccgtcatcgttgcgctgtctgttggtaccagcgaagtacagaacatgctgaatgcgattccggaagtggtgaccaatggtctgaatatcgccggtggcatgatcgtggtggttggttatgcgatggttatcaacatgatgcgtgctggctacctgatgccgttcttctacctcggcttcgtaaccgcagcattcaccaactttaacctggttgctctgggtgtgattggtactgttatggcagtgctctacatccaacttagcccgaaatacaaccgcgtagccggtgcgcctgctcaggcagctggtaacaacgatctcgataacgaactggactaacaggtgagcgaaatggttgatacaactcaaactaccaccgagaaaaaactcactcaaagtgatattcgtggcgtcttcctgcgttctaacctcttccagggtagttggaacttcgaacgtatgcaggcactgggtttctgcttctctatggtaccggcaattcgtcgcctctaccctgagaacaacgaagctcgtaaacaagctattcgccgtcacctggagttctttaacacccagccgttcgtggctgcgccgattctcggcgtaaccctggcgctggaagaacagcgtgctaatggcgcagagatcgacgacggtgctatcaacggtatcaaagtcggtttgatggggccactggctggtgtaggcgacccgatcttctggggaaccgtacgtccggtatttgcagcactgggtgccggtatcgcgatgagcggcagcctgttaggtccgctgctgttcttcatcctgtttaacctggtgcgtctggcaacccgttactacggcgtagcgtatggttactccaaaggtatcgatatcgttaaagatatgggtggtggcttcctgcaaaaactgacggaaggggcgtctatcctcggcctgtttgtcatgggggcattggttaacaagtggacacatgtcaacatcccgctggttgtctctcgcattactgaccagacgggcaaagaacacgttactactgtccagactattctggaccagttaatgccaggcctggtaccactgctgctgacctttgcttgtatgtggctactgcgcaaaaaagttaacccgctgtggatcatcgttggcttcttcgtcatcggtatcgctggttacgcttgcggcctgctgggactgtaagactgttgtacactaccggggccttttggccccgtttttttatctggaggattaatgacaatcacggacctggtactgattcttttcatcgccgcactcctggccttcgcgatctacgatcagttcatcatgccccgccgtaacggccccaccctgctggcaattcctttgctccggcgtggtcgcatcgatagcgttatcttcgtcggattgattgtcattcttatctataacaacgtcacgaatcatggtgcgttaataacgacatggttattaagcgcactggctctgatgggtttttatatattctggatccgcgttccgaagatcatctttaaacaaaaaggttttttcttcgccaatgtctggattgaatatagccgaatcaaagcgatgaacttgagcgaagatggcgtgttggtgatgcaattagaacagcgtcggctgttaatccgcgttcgaaatatcgacgatctggaaaaaatttataagcttctcgttagtactcaataagttatgaatttagccaaagctatgtttagtgtatttttaataatcagacatagcttaggctatattacctcttcccttatttgttatttattttaacgtttcattgatatataaatccaaatgaaaatcgttatcaataaagcaatgaaataatatattccaacagttgttttatattctcaaaatatgttaaggttgcgccctcatttggggagtagccgatttccagattccggaaatgtacgtgtcaacatactcgttgcaaaacgtggcacgtacggactgaatactttcagtcaggcgagaccatatgcacatcaatcgctatgcctgcatgaacgcgaaaaccatcacggcttgttgttcatgtatgcatgtttgctgggggcgatgatgtgttttatggataccccggtcaggacattgtcatgaatatcactgctactgttcttcttgcgtttggtatgagcatggatgcatttgctgcaagtatcggtaaaggtgccaccctccataaaccgaaattttctgaagcattgcgaaccggccttatttttggtgccgtcgaaaccctgacgccgctgatcggctggggaatgggcatgttagccagccggtttgtccttgaatggaaccactggattgcgtttgtgctgctgatattcctcggcgggcgaatgattattgagggttttcgtggcgcagatgatgaagatgaagagccgcgccgtcgacacggtttctggctactggtaaccaccgcgattgccaccagcctggatgccatggctgtgggtgttggtcttgctttcctgcaggtcaacattatcgcgaccgcattggccattggttgtgcaaccttgattatgagtacattagggatgatggttggtcgctttatcggcagtattattgggaaaaaagcggaaattctcggcgggctggtgctgatcggcatcggcgtccagatcctctggacgcacttccacggttaataagaacgctgccagaggtgaatattaaagtccgtctggcagtcgaacacttcttttgctgccagtgtttgccagacttctggcttcgcacgccaggcaaacggcgtcatctgcaataatgcgacggcttcatcaccgcgaagacgcatcggataacacaactccgcactctgctgtaatgtaaaaccttccagttgttctgcatgaggtgcatgaagatgtacttcattgtaaatcagccccttcagctccatcaaatgtcgcggtcccggcgtggcagtaatgacccagccgccgggcttcactactcgtgctaattcttctgctttacacggcgcgtaaatacgtattatggcgtccatactggtatcggaaaacggcaaacggtggctggaagcgacacaaaaagtgacctgcggatagcgtttcgccgccgcttttatcgctaccttgctaacatccagaccaaacgtggtgatttcgggcaacgcatcggcaaatgcgtgtgtgtaatacccttcaccacagccaatatccagcaccgccgtggccttatcatcaagccgttccctcagttgggcgacaattgcatcacgcagcggctgataatgtccggcatctaagaatgcgcggcgtgcttgcatcatttccgcgctgtcgcccggatcacgagaccgtttatgctgaacgggcagcagattgacatacccttctttcgccatatcaaactgatgtcgctggggacagatatagctgtttttttcacggctaagaggctgatggcaaagtggacaggaaaaagacatgacaactccggcaggatactaaaggccgcaagtgtaacgcgaatcacgcggcgggcaaatatccgaacgccaggagcgaagataaagcatagtaaaaagcctcgcattcgacgaggctttatagcgagattgaagcgtattcacacttcagatcagtggattcgatcagatagctgttacgttaacagctgccggacctttctggccgtcctgaatttcgaactcaacgttctgaccttcagccagagttttgaagccattaccctggatagcggagaagtgtacgaacacatctttgctgccatcagccggagtaatgaagccaaaacctttagactcgttgaaccacttaacctgacctttaatctttgccatttgaaaaattccttagattgttttcttcgcccgcaggcataacatagataaaacactcacattactgcaactggcaccaatataaggctcggcagagaagcggtattcaacgtcaacgtgtttactcaggacttctttactgaaaatgccacacataaacagaactgtacctcgtttaacccgaaatctgttatcacatacaacgttaattatggcaagccatttttaaacatgtctcgatcagacgcacaaatctcgatacgtcttccactttttttgcacacttatgcaacggaatacgcgccgatatatcattgtgcttaaccttgccagttcaggcagatacttaaactggcgtattttctaacatagttcaataagttcagttgttccaggccagtgggagaagttattacatagtgcgtgcaatatcacattttttgctatgcaatgaataaaaagttatatcactttttctcataaaacagtcagttaacggctattaattaccctaaagagaagtcaatccccaaagggattgtaaatttaaaataagaaaaattgatgaatgagcaaaaaaatcaagagagaaacgtttcgctaataaataataccacgcttaatcacaaatccgatgtaaacatcctaataaattaatggggtaaatatctttttctgatatcccgttacgcaaataaataatatgataattatttgaagtcagaccagagttttaatttgaagcagttgcaccatgacagtgcgtataatcaggatgaattgagtaacccttcaacgacggggttactcaagattgaggaaggattatcgttcggcgaccagacgaataatatcttcgtcttcaacgcttttttgactctcaacggtctttttatctgctttctctggttcgtttgcttcgcacaaacgacgtaacagtgcattttgacgtttttgctgatccagcaacgcctcaagcagttcaatctgttcgttagtccgactactggcacgattgataaaaaaccacaagatgagcccgataagaagaaccaccacgcttacaaccaaagacgcaatgttcatcacgccactatttacaacttcgttcatttcaccacctctgagtagaggcgctattctaccactgctggagaggaagaaaatctagtgctgaaaaaatgatatcaccacgggataaactggttaatggcacaaattccgctgaaaaattgtacatcctgatcgcacatcatgttgaatacctgcgcccaaagcagcaagcaagccaacaccacgacaaccagaacgacccatcgaaactttttcactccaatctccgtttcacctaccttatgtcattaaactagcatgcgttagttaaacagcgcctaactatgtcgatattcgtgctttttcggaatgagtcgcttgcttcagcgcatattgccgctacgattaagcgaacataaaaagagaagaggttgtaatgcgattcatcattcgcacagttatgctgatagcactggtatggataggattattactcagcggatatggcgttttgattggaagcaaagagaatgccgcaggattaggtttgcaatgtacctatctgactgccagaggcaccagcacggtacaatacttgcacactaaaagtggttttttggggataacagattgcccgctgttacgcaaaagcaatatcgtggtcgataatggttaagggcaataaataaccagattctcactcctgagtaaaatactcttatagcaagcgcgtttaatataacgccaccttcaactttatttttctcatgctaaataaagaacctgtctgtttgatattccgacaggttcttactctcatcagaacggatagtcgtgataacccatttgggcagaaattttgcgcgctgcggtatgcaacattgcgacatattcctgtaaacgctcttcagagaaacgcaacgtcgggaaggagatgctcaaaccggcaatgaccacgccaaagcgatcaaataccggtaccgcaatgcatcgcagcccttcttcctgctcttcattatcttcgccatacccctgctcgcgcacctggtccagaacgggtaataacgcttctgtactggtgatggtccgctcggtactgcgtttatactccacgccctcaagaatttgcttcacttcatcgcgatcgcgccatgccagcagtaccttaccaatcgcggtgctgtacagcggattacgacgcccaatccgactatacatgcgcaaattgtacatagagtcaattttgtgaatgtaaacaatactgtcttcgtccagtgcgccgaggtggatagtttctttggtcaggcgggagagctcacgcatctggatatctgcgctacgaattaaatcgacgttttgtaacgcgcgagcgcccagttcaaacaatttcagggtcagggaatatttctcgctctccccttcctgcgccacataacctaaggttttcatggtctgtaaaaagcgataaacggtgcttttactcatcatgacgcgctggctcagctcggttatccctatttcgcgctcttcacccagcgcctgcaaaatgccaaaaacttttagcacggaagatacagaatcaggctgtttatccagatctgcgttagccatttatcacctcattgcgagtgttttataaaaatcagaactgttttttattataatttcgcaccagggtggtcgcaatccatcttttgccggttagttacaattctgcgacatccaccgtgaatatcagtgctagaatcatacccctgttgattattcaccaaagatataaaattcctatgccaaaagttcaggccgacggcctgccattgccccagcgatacggtgcgatattaaccattgtgattggtattagcatggccgtccttgacggcgcaatcgccaacgtcgccctgccaacaatcgccacggaccttcatgccacgccagccagttccatctgggtagtgaacgcctatcaaatcgccattgtcatctccctgctcagctttagctttctgggcgatatgtttggctatcgacgtatttataaatgcggtctggtcgtttttctgttgtctagtctgttctgcgccctttctgatagcctgcaaatgctcacccttgcgcgtgtcatacaaggtttcggcggtgcagcgttgatgagcgttaataccgcacttatccgcctgatctatccacaacgttttctgggtagagggatgggcataaacagctttattgttgccgtctcttctgctgccgggccgacaattgctgcagcaatcctctccatcgcatcctggaaatggttatttttaatcaacgtaccgttaggtattatcgccctgcttctggcgatgcgttttctgccacccaatggttctcgcgccagtaaaccccgtttcgacctgcccagcgccgtgatgaacgcgttaaccttcggcctgcttatcactgcgttgagtggtttcgctcaggggcaaagcctgacgttaattgctgcggaactggtggtaatggttgttgttggtattttctttattcgccgccagctttctcttcccgtaccgctgctaccggtggatttactgcgtatcccgctgtttagtctttctatttgcacatctgtttgctctttctgcgcacaaatgctggcaatggtttccctgcccttttacctgcaaaccgtgctcgggcgtagtgaagtcgaaacaggtttacttctgacaccgtggccgttagcaacgatggtgatggctccgctggcaggctatttgattgaacgcgtacatgcaggattgctgggggctttagggttgttcatcatggctgcggggcttttttccctggttctgctgcccgcgagtcctgcggatatcaatattatctggccgatgatcttatgtggtgctggatttggcttattccagagtcccaataaccacaccattattacctccgcgcctcgcgaacgtagcggtggagccagtggcatgttaggaacggctcgtctactgggtcagagtagcggcgcggcgctggtggcgctgatgctaaatcagtttggagataatggtacacacgtcagcctgatggctgcggctattctggcagtgattgctgcctgtgtcagtggtttacgtatcactcagccacgatccagggcataaaaaaagcgcgtcgatcaggacgcgctttttagtatttacttcatattacttcaggtattcacccgtacgcagagcttcaattcgtttatccagcggcgggtgggtcatgaacaactcactgaggcttttgctcttaccgttaatgcagagagccatcatgctggttgcttcttgcggttcatagctggttttcaggcgctgcagcgcggcaatcattttctcgcgaccaaccagttttgcgctaccggcatcagcatggaattcacgatgacggctgaaccacatggtgataatgctcgccagaataccaaacaccagttccagaaccgttgcaaccgcaaagtagatcagcgggttgccgttgctctcttcaccttcatcacgatttccgcccataaaacccgcggcaagctgcgccagaatacgggaaataaagataacgaaggtgttcaccacgccctgaatcagcgtcatggtgaccatatcaccattggcgatgtggctgatttcgtgagcaattaccgcctcggcttcatccgggctcatgttctgcagcaaaccggtgctgacagcaaccagagaggcatcacggcgcgcaccggttgcaaaagcgttgatgtccggcgcatggtagatagccacttgcggcatagcgatccccgcctgacgagcctgggttgctacagtattgaccagccaacgttccctttcgttacgcggttgctcgatcacttccccgccaacagatcgtaatgccatccatttggacatcagaaggctaacgaaggaaccaccaaaaccgaacagcaaggccatgatcatcagcccctgaacgctgctgctctgtatccctgtcaggctcagtaccagcccgaaaacgaccattacggccaggttcgttagcaggaagagcgcgattcgcatcataattttctttttacctcagtttaacaaaacgcaatatgcgatacccacatcgtatgggttacgcgactattttcaagtctggatagtgcgtaagtcaccagaaagacacaactttacattttgtagcatctgatttacggcatcttgtcgctgttaaaaaatcaggcacaatttcttgtgcctgattgatattacttgacgggagcgggttgttccgcgggtctggctttttcaagcttcgccagatcgagtgcgatattcaccgtctcatccagataaggatccggctcctggtaatctttcggtagatcatccagtttcttcaactccggtttaccttcgcgtttaaagcgttcgttcaaacgcgccagacgcgtcgcatcatcttcattattctctttctcacgcacagcgtaattcagagaaacgatattgcgcttgtccttcatagcgttgaagcgcgcgatatccttcatgatgttctggaactcaggatctttcgcgatacgcgcattatgttccttcagcagctccggttcaaaggccgttaaatctccacttttcacataagtcgcggcatcaatgctatcccacggcagcgcgttatcttcgaatttctcacccgtttccgtttcttcattacccgtcggcatgatgatgtctggcgttacgcctttacgttgcgtactgccgccgttaacgcgatagaatttctggatcgtgtactgcacagaacccagcgctggccattcaggacgtaacatctgatcgtaaatacggttcaaactacggtattgctgaacggtgcctttaccaaacgtcggttcacccacaaccagcgcacgaccgtaatcctgcattgccgcggcaaagatttcactagcgctagcactgaagcggtcaaccagcaccaccagcgggcctttatagaaaacctgtccgtcggtatcgctatcttcacgaaccttgccgttgttatcgcggacctgaacaatgggacccgcaggaataaacagaccggagaggcttacggcttcagttaacgccccaccgccattgctacgcaggtcgatgatgacgctgctgacattctgtttttccagtttctgcagttgcactttgacatcgtctgtcaaacccacatagaagcccggaatatccagcacgccgactttctctttaccgacggtcttcacgctcattttaaccgcgcggtcttcgagacgaatacgttcacgggtcaacgttacagtacgggtcttggtccctttaccagcaggtaaaatttccagacgaactttactgcccttcggccctttaattaaggcaaccacatcatcaagacgccagccaatcacgtcaaccatcggcttgcctgtttgaccaacaccgacaattttgtcaccaacgctgatagctttactcttcgctgccggaccacctgccaccatgctattgataacggtgtagtcatcatccatttgcagcactgcgccaataccttccaggctcaaactcatttcagtgttgaactgttcggtattacgcggggaaagatagttggtatgcgggtcgatttcacgcgcaaacgccgtcattgccaggctgaaaacatcttcgctgttggtttgcgccagacgacgaatggcaaatttgtagcggcgagtcagggtttcacgaatttctttatccgtttttcctgtcagcttcaggcttaactcgtcgaatttgactttactgtcccacagcgcgttcaactcagcctcgtttttcggccagggcgctttgctgcggtcaaggttataagtgtcgttgccggtgaaatccatcggcttttccagtacgctcaaagcgtactggtaacgctcaaaacggcgcttttgcgccagattgtagagatcgtagaaaacgtcgagtttgccactacgcagttcatcgcctaactcggttttctttttcgcgaactgttcaacatcgcttgccagcagcacgttgtggctgtaatcgagcagattcaggtagcggtcaaagattttggcgctaaatgcctgatcgaggtcgaactggcgataatgagaacgggtgaagcggctcgttacgcgctcacttaccgtcgcatgctgcgtctcttcctttaataccggaatttgatcagcacgcgtgatatcttctacagcgaaggtctggcctgctattgcaagcaggccagctaacgcggtaagcctaaaaaacatgttcatgcctggcccggcctccgtttcagaacaccaggtgttctgcgcgcacaatcaaagacataccgctattcagctggacgcggacgccgtctttggtgatttctaatacggtggcatccatcgcgttttgacccgctttcaccttcagggcttgtccgacagtcagagcactaatgtcagaaaccggggtgtgctgttcttcgcgaggtgcttttactgtttttggcgctttctctaccggcttttgcgcacgaggtttacgttcagcgccttctttgcggcgtggcgtagtcggacgtggcttgcgttcgcggcgcggtgcgtcttctttctcaccagcagttgcggcagcttcgcgttttttcgcttgctgttcagcacgctgtgcctgaacacgcgctttcgcttcttcaagctgcttgcgagcatgctctacatgttgctcgtccagctcaccgcatgggttgccgtcaagatcgacacgcgttgcgccgggtttaacaccgtaaagataacgccagctgctagtgtagagacgtaaagcggatcgcaattgcgttttgctcaggttcatttccccagcaacacgatcgaccaaatcctgaaaaataccgattttcagcggacgcgcttcaccttccgcactgaaacagtggggaaaacgttcggccagaaacgcgattacttctttactgctattcaacttaggttgattttccatgaaatttcctgattacaacggacgtagccaacaagcgcaggcatgaacaggcgtcattataatgacgctatcagtaaatgctacgttatccgttgattatcctgcgacgctcgcaaagaattttttgtaatccgtcgttgcaagcactttttcaagctgtgccacaagctgacgtaagccttgctcgtcctcgtctgtaaagcgaccgaagacggtactatcgatgtcgagaacaccaataatctgatttttcaccaccagcggcagaacaatttcagaattactcgccgcatcacaggcaatatgcccgtcaaacacatgaacatcctcgatacgctgcacttgattgcgggcaaccgcagtgccgcacacgccgcgcccgacgggtatccggacacaggcaattttgccctgaaatggtccgagtaccagtgtatcgtcctcaagcaaataaaaacctgcccagtttatgtcagtgagacgctcatataacaacgcactggtgttcgcaagcgttgccagaaaactggtttctcccgccatcagcgcgttaaagtcgcgatttaaatccgcgtaaaattctgttttgttcattatataatcacttggttgtcttacctggatctgccagcctattaaaataagcattaaatgcgttaatgctcaagatcattcccatcatgggttaagattaatgttaattcttattacatttggcacgtcatggctcttaacacaccacaaattacgccgacaaaaaagataacagtgagggcaatcggcgaggaactgccgcgtggtgattaccaacgttgcccgcaatgtgacatgctgtttagcctgcccgagataaattctcatcaaagtgcctattgtccgcgctgtcaggcaaaaattcgtgacgggcgcgactggagcctaacgcgcctggcggcaatggccttcaccatgctgttgcttatgccgtttgcctggggcgaaccgctgttgcatatctggctgttaggcattcgtattgacgccaacgttatgcaaggcatctggcaaatgaccaaacagggcgatgcgataacggggagcatggtctttttctgcgttattggtgccccgctcattctggtgacctccatagcttatttatggtttggtaaccgactgggaatgaatttacgtccggtactgctgatgcttgagcgacttaaagagtgggtaatgctcgatatctacctggtcggcattggcgttgcttctataaaggtacaggattatgcccatatccaggctggtgtcggcttgttctcttttgtggcgttggtgattttaacgacggtgacgttgagtcatcttaatgtcgaagaactgtgggagcgattttatccgcagcgccccgctacgcgtagggacgagaaacttcgtgtctgtcttgggtgccattttaccggctatccagatcagcgtggtcgctgcccgcgttgccatatcccgctacgcctgcgtcgccgtcatagtctgcaaaaatgctgggcggcgctgttagcgagtatcgttttattgttacctgccaacctgttgcctatttctatcatttatctgaacggaggacggcaggaagatacaattctttccggaattatgagcctggcaagtagcaacattgcggttgcaggaatcgtgtttatcgccagtattctggtaccgtttactaaagtgatcgtcatgttcactttactgttgagcattcattttaaatgccagcaaggtttacgcacacgcattctgttactgcggatggtgacctggattggtcgctggagcatgctcgacctgtttgtcatatctttaaccatgagcctgattaatcgcgatcagatcctcgcttttactatgggaccggctgcgttttatttcggcgcagcggtaattttgactattcttgctgtggaatggctggacagccgcttactttgggatgcacatgagagtggaaacgcccgcttcgacgactgaataaccgcttactttgggatgcacatgagtcaggaaacgcccgctagcacgactgaagcgcagattaaaaataaacgccgtatcagtcctttctggctgctgccgttcatcgcgctaatgattgccagttggctgatttgggacagttatcaggaccggggtaataccgtcaccatcgactttatgagcgcggatggtattgttccaggccgtacgcctgttcgttatcagggcgttgaagtcggaacagtgcaggatatcagcctcagcgacgatcttcgtaagattgaagtcaaggtcagcatcaagtccgatatgaaagatgcgctgcgcgaagagactcagttctggctggtgacgccaaaagcaagcttggcaggtgtctccgggctggacgccctcgtcggtgggaactatatcggcatgatgccgggtaaaggtaaagagcaggatcactttgtcgcactcgatacccaaccgaaatatcggctggacaatggcgatctgatgatccacctgcaagcccccgatctcggtagcctgaacagcggtagtttggtctatttccgcaagatcccggtgggaaaagtctacgactatgccatcaatcccaacaagcaaggcgtggtgattgatgtcctgatcgagcggcgttttaccgatctggtgaaaaaaggtagccgtttctggaacgtttccggcgttgatgccaacgtcagtatcagtggcgcgaaggtgaaactggaaagcctggcggcactggttaacggtgcgattgccttcgatagtccagaagagagcaaacctgccgaggcggaagatacctttggtctgtatgaagatctggcccacagccagcgtggcgtaataataaaactggaactgccgagtggggccggattaaccgccgacagcacgccgttaatgtatcaggggctggaagtcggacagctgactaaactggatttaaatcctggtggtaaagtcacaggggaaatgaccgttgatcccagcgtcgttaccctgcttcgtgaaaatacccgcatcgaattacgcaacccgaaattatcccttagcgatgctaatctcagcgccctgctgaccggcaaaaccttcgagctggtgcccggcgatggcgagccacgcaaagagttcgttgttgtgccaggcgaaaaagcactgctgcatgaacctgatgttctgacgctgaccctgaccgcgccggaaagttacggtattgatgcgggtcagccgctcattcttcacggcgtgcaggtaggccaggttatcgatcgtaaactcaccagcaaaggcgtcacctttaccgtcgccatcgagcctcagcatcgcgaactggtaaaaggcgatagcaaatttgtcgtcaacagccgtgtcgatgtgaaggtggggctggatggcgttgagtttctcggtgccagcgccagtgaatggatcaatggcgggatacgtattctgccgggcgataaaggtgagatgaaagccagctatccactgtatgccaatttggaaaaagcgctggagaacagccttagcgatttacccaccacaaccgtgagtttgagtgcagagacgctgccggatgtgcaggcaggaagcgtagtgctgtaccgtaaatttgaagttggtgaagtgattaccgtgcgtccgcgagctaacgcgtttgatatcgatctgcatattaagccggagtatcgcaaccttctgaccagcaatagcgtgttctgggcagaaggcggggcgaaagttcagctgaatggtagtggtctgaccgtacaggcatccccgctctccagagcattaaagggagccattagcttcgacaacctcagcggtgccagcgccagtcagcgtaaaggcgataagcgtattctgtatgcttccgaaacagcggcccgtgcggttggcgggcagattacgcttcacgctttcgatgccggaaaactggcggtcgggatgccaattcgctatctcggtattgatatcgggcaaatccagacgctggatctgattaccgcacgcaatgaagtacaggcaaaggcggtactttacccggaatatgtccagacctttgctcgcggtggtacgcgcttcagtgtggtcacaccgcaaattagcgcagctggcgttgagcatcttgatactatcctccagccgtatatcaacgtcgaaccaggccggggcaatcctcgccgcgactttgaattacaagaggccaccattactgatagccgttacctggatggcttaagcattattgttgaagcgccggaagccggtagcttaggcatcggtacgcctgtgctgttccgtggtctggaagtcggtacggttacaggaatgacgctggggacattgagtgatcgcgtgatgattgcgatgcgcatcagtaaacgctatcaacacctggtgcgtaacaattccgtcttctggttggcaagcggttacagtctggactttggtctgacgggcggcgtagtgaaaaccggcacctttaaccagtttatccgtggcggcatcgccttcgccacgcctccgggtacgccactggcaccgaaagcccaggaaggcaaacacttcctgttgcaggaaagtgaaccgaaagagtggcgtgaatggggaactgcgcttcccaaataatgcccactgctccggcgtgcctgcgccggagcgtttatgctaaactgcgcgcctgtttttttgccagtggtacatgctcgtggcccaacacaccgtttatttcccggacgcctttctgacacaaatgcgcgaagcgatgcctagcacgctcagttttgatgattttcttgccgcctgtcagcgcccgttgcgccgcagcattcgcgttaatacgctgaaaatctccgttgctgatttcctgcaattaaccgctccttatggctggacgcttacgccaattccgtggtgtgaagaaggtttctggattgaacgcgacaatgaagatgcattgccattgggtagtaccgccgagcatttaagtggcctgttttatattcaggaagccagtagtatgttgcctgttgccgccttgtttgctgacggtaatgcaccacagcgggtgatggatgtcgctgccgcgcctggctccaaaacgacgcaaatttccgcgcggatgaataacgaaggggcaatccttgccaatgagttttccgccagtcgggtaaaagtgttacatgccaatatcagccgctgtggtatcagtaatgttgcgctcacacattttgatggccgcgtgtttggtgcggcagtgccagaaatgttcgatgccattttgctggacgctccctgctctggcgaaggcgtggtgcgtaaagatcccgatgcgctaaaaaactggagtccagaaagcaatcaggaaatcgcagctacacaacgggagcttatcgacagcgcctttcatgcattacgtcctggtggtacgctggtttacagcacctgtaccttaaaccaggaagaaaacgaagccgtttgcctgtggctgaaagagacttaccccgacgcagtagagtttttaccacttggcgatctcttccctggtgcaaacaaagcgctgaccgaagaaggctttttgcatgttttcccacaaatttacgactgcgaaggcttcttcgttgctcgtctgcgtaaaactcaggcgattcccgccttacccgcccccaaatacaaagtcggtaattttccgttcagcccggtgaaagatcgcgaagctggacaaattcgtcaggcggctacaggtgttggcttaaactgggatgaaaacctgcgcctctggcagcgtgacaaagaactgtggttgttcccggtgggcattgaagccctgatcggtaaagtccgattttctcggttggggattaaacttgccgagacgcacaacaaaggttatcgctggcagcatgaagcggttattgctcttgccagtcccgataatatgaatgcattcgagctgacaccgcaggaagcggaggagtggtatcgcgggcgcgatgtttacccgcaagccgcgccagtggcggatgatgtattggttactttccagcatcaaccgattggtttagccaaacggattggtagccgattgaaaaacagctatccgcgtgaactggtgcgcgatgggaaactttttaccggtaacgcctgacagcgcacaaaaaaagcgcactttttgactggcacattcggctgcctcaactaggctgaaaaatggtgcgatcggactggtcgtaccacaatcggcagctaaatggagagcacgaagatgaaaaccagtgtgcgcataggcgcttttgaaatcgacgacggcgaattacacggtgaaagcccaggtgatcgaacgttaaccattccttgtaaatctgaccccgatttatgtatgcaactggatgcctgggatgctgaaaccagtatccctgccctgctaaatggcgaacactctgtcctttaccgtacccgttacgatcaacaatctgatgcctggattatgcgtcttgcctgatccaaaaagaacccgtcggcatggcgggttatttgtcctggttattcccccgttgtaaaatctctcctaaacttaacggtacggcaccacacttcggggatgaaatgttcgcgctggtactttttgtttgctacctggatggcggttgtgaagatattgttgtggatgtctacaacacggaacagcagtgtctttattctatgagcgatcaacggatccgccagggcggttgttttccgattgaggattttatagatggtttctggcgacctgcacaggagtacggtgatttttaattattgcaattgcacaagagtcagttcgcccccaaagacagcaccggtatcaatataatgcaggttgccaatatccacgcgatgtcgcaacggtgtatgaccaaaccagaaatgatcagcacctgtaattccctgccctttttggcgttcacctaatcggctgcggctccacaagacctgatgcaaatcaacgtccttttgccattcataaacatcatctggataatcggcatgagcaataatatgcttgccggtgcgactgtgtacttcaagaataaagggcaaatgctgacatttttccagcgccgttttcgcttgtttctgttgattatctgccagcgcaataaaccagtcgccgccattcatcaaccacaaagacatctgctgggatgccagcgcatccatcgccatctgttcatgattgcctcttaccgcacaaacccaatgttgttccagtaactgcagacaacgtaaactttgcggcccacgatcgataacgtctcccacactgataagtaaatctcgccacggatcaaaacgacaatgccataatttgcggcgcaactgctcaagacaaccgtgtatatcgccagaaagccagatatgtcgccattgatgacccgcaattctctgataaacgggcgcaggctgtttcatcaatattttcctcccgcgctaaagatcacataatcttaacaagaatgttaaaaaacgctggactcagacagtagagtgtgtgttatggttgactataaagtcagcgaaggaaatgcttctggcttttaacagataaaaagagaccgaacacgattcctgtattcggtccagggaaatggctcttgggagagagccgtgcgctaaaagttggcattaatgcaggcttagttgccttgccctttaagaatagatgacgacgccaggttttccagtttgcgtgcaaaatggtcaataaaaagcgtggtggtcatcagctgaaatgttaaaaaccgcccgttctggtgaaagaactgaggcggtttttttattggaaatcaaaaggctattttaggtaattaacagagtttttcagctcgttctataaacggtgccagactcattttttcgccgggattgttaggatcatcaatctgaatcacgctaatgggttgggcattggtcttcccactggcaacttccttttgtgcgatatcgtttaaaggatactgcacgagggtactcggattaataacatacaaagcattacccggtcggcaagtcagcatcacctcttcgcgattaaacgcccatttgtctttacccacttcaaaacgactgacggtaatcacctgcggtgcagccagcgccgctgcagaactggtgagtaacagaaacgccagaatactttttttcatcattttcgtaatccatcaaaaaggttcgagagtcgcaagcaggctgatgatcaccagcactaccgcacctatcgcccattcgagtttagtcatccacacaaaccagggtgccgcacgatcttcatcctgcctcatgcgcggtacaagaacataacgattagccagcgcaatgaccaccataatcatcaccaggatggctttgagcaataagagttggccccagtaagtcgtaagcgtggggggaaatccggtaatcaacaatgcattaagcacgccgcttgccagtacgccgatcaccgcaaaatgcccgcaccaggaaaaacgcatcagcgcctgaatagcctggtgtcgccaacggcctttgatgagttgcatacaccagagcaccggcagtaatcccccaaaccacgccgccgcacaaatcaggtgaatcgcgtgattagtctgatggattttcgctgttaccccttcattcagcgtcgcatgccccactcccgccagcagaataaattgcgcggtagtgagcataaacagcaaacgtggcatattccgcggttgcataagggcgacgatcaacgttacgagggcgagaacaatttgccataaccagatgccaccaaactgcgtttgcaaaacagcctgccaaatgtttgggctaaatacatctgtccatcccgttcccatcaacccgccctgaacggcgagcattgcagtggcactgatcaaactccagacggcagcgtgctgttgtaaacgcagaaaacgcttcgccagcaagcgacgaatcgtcaagggggccagccaggcaccgtacattgcgaagccaaaaaccagcatcaggctggtgaaatggataaatcgcagcgcgatccaggtaaacgccagcatgatttatttcacgctaaaggtgtagtgtcctttcgttttatgcccgtccacgctaacaacatgccagtcaacggtgtaggttccgggtttcaggctatcggccagtggaacaatcagttgcttttggtcctgctcatttcgcttcgccggtaatgttttaatattttcgttttttggccccgtgatttttgcaccactgaatcctgtttcaacaccttcgctgaagtttaaagtgattgcctgcggtgcagctgtcacttgcgcgtttgccgcaggatactgatgcgttaaatgcgcatgtgcccagacggaaggtgtcaccaagctagtggtcaggattgccagcgcgtagcgaagggagcgtgcagtactagccatattatctattcctttttgtaataacttttttacagagcataaccttgtctaatgtctgagtcgaggatcatcaattccggcttgccatcctggctcactcttagtaacttttgcccgcgaatgatgaggagattaagaatgctgaagaatctggctaaactggatcaaacagaaatggataaagtgaatgtcgatttggcggcggccggggtggcatttaaagaacgctacaatatgccggtgatcgctgaagcggttgaacgtgaacagcctgaacatttgcgcagctggtttcgcgagcggcttattgcccaccgtttggctagcgtcaatctgagtcgtttaccttacgagcccaaacttaaataaaacttatacagagttacactttcttacataacgcctgctaaattatgagtattttctaaaccgcactcataatttgcagtcattttgaaaaggaagtcattatgagcttctggaaagttgcagcagcgcaatatgagcctcgtaaaaccagtctcaccgaacaggtagctcatcatctggagtttgtgagggccgccgccaggcaacaatgtcagctgttagtttttccaagcctttctttactggggtgtgattatagccgacgtgcccttcctgccccacccgatctcagtctgttagacccgctttgttatgccgcaacgacctggcgaatgaccatcattgccggccttcccgttgaatataacgatcgctttattcgtggaattgcggtgttcgcaccgtggcgaaaaacgcctgggatctaccatcagagtcatggtgcatgtctgggccgtcgttccagaaccatcacggtggtcgatgaacaaccgcaaggtatggatatggacccgacctgtagtctgtttactacagggcaatgtctgggagaacccgacctgctggcgagcgcccgtcgcttacaattttttagtcatcagtacagcattgccgtgctgatggcaaatgcccgtggtaacagtgcactatgggatgaatatggtcgtctcatcgttcgcgccgatcgtggtagtttattgttagtcggtcagcgtagtagtcagggttggcaaggcgatatcattccattacgctaagctttttcggcctggagcatgccatgttgcgcattatcgatacagaaacctgcggtttgcagggagggatcgttgagattgcctctgttgatgtcattgacggaaaaatcgtcaaccccatgagccacctggtgcgccccgatcgtcctattagtccacaagcgatggcgattcatcgcatcaccgaagccatggtcgccgataaaccgtggattgaagatgtgatcccacactattacggtagtgaatggtatgtcgcgcataacgccagctttgaccgccgcgtactgcctgagatgcccggtgagtggatttgcactatgaaactggcccgtcgtttgtggcctgggatcaagtacagcaatatggcgttatataaaacacgcaagctcaatgtacagacgccgccgggcctgcatcatcaccgcgcgttgtatgactgttatatcaccgccgcgttgcttatcgatattatgaacacctccggctggacggcagaacagatggccgatatcaccggacgtccgagcttgatgacgaccttcacctttggcaaataccgtggcaaagcggtttccgacgttgccgaacgcgatccgggctatctgcgctggttatttaataacctggacagcatgagcccggagctgcgtttaacactgaaacattatctggaaaatacttaatccgcaggcgtagcgggtaatgttccctgcgccagcgcgaccagaaaagcatattccatcgctacgccttcgtagcttttaaagcgaccagatttaccgccatggccactgtccatgtcggtacagagcaataaaagatggtcatcggttttcagctcgcgcaatttagcgacccattttgccggttcccaatattgcacctgagaatcgtgcaaaccggtcgttaccagtaaatgcggataagcctgtgcggtgacgttgtcatacgggctgtagcttttcatgtactcgtaatattgcggatcctgcgggttaccccactcttcaaactcaccagtggtaagaggaatactttcatcaagcatcgttgttacaacatcaacaaacggtacctgggcgataacgccgtggaataattccgggcgttgattaattgcaacgcccatcaacatgccccccgcactcccgcccatcgcataacaaaggctaggagagccatagcccagttttaacaatgcatcgcaggcatcaagataatcattaaacgtatttttcttcttcagaaattttccgtcttcgtaccattgttgccccagctcaccaccgccgcgaacatggacaatggcgtagacaaagccacgatctaacaaactcaagcggctaaaactgaaatcggcatcaatacttgcgccgtaagaaccatagccatacaccagcaacgggttgtgtcctttgcgaaaatgtttgcgatggtagaccaagctaaccggaacttcgacgccatcacgggcgactatccacaggtgttcactgcggtaattcgccgcataaaaaccaggaacttccgtttgttttaatacacgacgctcaccggtatccatatccagttcaaacaaagtgtctggtgtagtcatggaagaataaccataacgcaatcgcgcggtttcaggttctggattgtaggcaatccaggtcacataggccggatcatcaaaggcaataccaatgacttcccgggtcttgcggttaatttggcgcaaactggttaacccgcgctgacgctcttcaaccaccagccagtcggtaaacagcgtaaacccttccagcatgatgttttcgcgtggcggaattaactcttcccactgttgctcatcacgcatacgggtacggtataagccaaagtttttgccgtggcggttggaacgcagataaaaacgatgctggtagtgatcaaggctgtattcgtgatctttgcggcgcggcagaaaaacaaacggctcggcatcggccatttccgcgtccagcaggcgaacttcactggtggtggcgctggccaaatgaatgactacatagtgcttgctggtcgttttatgcaggctgacgtaataggtatcgtctttttcttcgtagatcagtttatcttggcttgctggcgtaccgatggcgtgacgccagacctgataaggcagcagcgtcaccggatgcttgcgaacatagtagaaaatccaggagtcatttgcccagacaaagctgggttcaacgttatccagcagttccgggtaccagttaccagtttccagattacgaaaacgaatgccgtactggcgtcgggaaagaaaatcttctgccagcgccataatggtgttatcgggcgtaatcgccattccgcccatgctataaaactcactatgagctgcgcgcttattggcatcgagcaatgtttcccactcatcccactcttcactgaatgcgctttgacgctggtagatagcatattcacagcctggttcataaatatgccgatagcggtagccatttttgatgtagggcgcagaaacttctcgttgcggaatgcggtcgatgatttcctttaagatgcgatcctgcaaggcttgttgactggccatcacccgatgaccgtaactattttcttgttgcaggtagtccaggacttctggctgagaacgcgtatcgtcccgcagccagtagtaattatcgatgcgcgtatcgccatgaagcgtcatggcgtggggaatgcgggcggcttttggtagcatgttattgttctttctggttgaaacatcttataagggtggcaaaactcaccggggatgcaagcgaaacaggggagtcattgcttagatgatgacaggtaatggcgcggatatcgaatgttatgcagacagagaaaatcagcctgttcaaatggctgtgcgattctggatagcccgaaatagtcaacttcaggctatccagagagcggaattattccgccaaagtgcgtttttgctgttcgagatcgcgttcaatgccgtcacgaacatcctgggggattttcagcgcgtcacccagtgcattcaggtaactgcgttccataaaatggtcaatatcaatagccgcgcaactcaggaaatagatttccagcgcctcttcttcattgcggaccccggtagccaggcgttgtggatccagcggttgttcgattgcctgctcaatgagtacacgcccctgctcttccacgccggctccacgcaattgctggtcgattgccgcacgttctttggcatcaatatgaccatcacttttagcggcaaagaccagcgcaaggatcaaacgtgctgtacgctcatccagcggcgtactttgcgcgccaaactgcggttcgtcctgatgcgccgcgcgaattttatctttgtatttattccacagcaccgtacccgctaccgctccgccgccaaccagtaacgcgttggtgccatatttcgtaagaagtttacgtgcacttttatttgcgaccagcagcccagccagtccgcctaatgcgcctggcactaacagtttgaccaatccctgatccgcagagctggaggtagaagaactgctttgcccaagcagggattgcagttgatttaaccagttagccatatttgctcctcaataaccatttttagtgcctgtagcatagcggatgaggatgtcagaaaatgtatatcgagacaaaagatgcgcaaataagcggggcggtaggccgttattcaaagaaattcgcgccaggtaaggtatttactgtatatcaggtgataagggtattttaggtgaaagtagtttgtcgttttgagtggcattgtttgatgctgattgcccgatgcgacgctgttgcgtcttctcaggcctacgattgtggtgcgttctggggcggacaaggcactcgcgccgcatccgccaacagtcaatcgaattatcagaagccattaacgccgctgatattccgccattcccgctttgcagtccacgctgacctggtaatgaatatcggcacttttaccacgcacggttagcggtacactccatttatcatctttaccctgaatgtcctgcaaactgacccaagccacgggatcggcctgaccgacaattttttgatcatctgcccaacgcgccacgcgattttgttgataatcacgttttacgctcgcggcaattccggcagcatccagatcttcacactttgggaaagtgacgctcttgctggtttcattattggcagcgaaaacacttgcgcaggcagaaaccaacaacagccctaaaaacgcccctctttttttcatgtttttctccatagcacaatgattcaggagaaagcatggtacaaattgtcaggagcgcaagttgcttcaggccgcgtgactggcatcttcctcttcggattcagcaccgacgacctgtggggacggtaatttgccggttttcagaatggtgctcagcacatctttttgttctgccagccataggctaagggcttcacgttgctcgtcttccatttgcactggagaatttgtcagccaggtgtcaagcagatccgccgtatcaagcattttgtcataagcatcggcttcctttttgctggtaaagctcattttctcttcgccctcacgaatgactacgtatttaacttcaaccgccatttgcagcctctcataataactgtgattttatacagtatatttcttttcggttgagaaatcaacatcagcaataaagacacacgcaaacgttttcgtttatactgcgcgcggaattaatcaggggatattcgttatgacgttattaggcactgcgctgcgtccggcagcaactcgcgtgatgttattaggctccggtgaactgggtaaagaagtggcaatcgagtgtcagcgtctcggcgtagaggtgattgccgtcgatcgctatgccgacgcaccagccatgcatgtcgcgcatcgctcccatgtcattaatatgcttgatggtgatgcattacgccgtgtggttgaactggaaaaaccacattatatcgtgccggagatcgaagctattgccaccgatatgctgatccaacttgaagaggaaggactgaatgttgtcccctgcgctcgcgcaacgaaattaacgatgaatcgcgagggtatccgtcgcctggcggcagaagagctgcagctgcccacttccacttatcgttttgccgatagcgaaagccttttccgcgaggcggttgctgacattggctatccctgcattgtaaaaccggtgatgagctcttccggcaaggggcagacgtttattcgttctgcagagcaacttgctcaggcatggaagtacgctcagcaaggcggtcgcgccggagcgggccgcgtaattgttgaaggcgtcgttaagtttgacttcgaaattaccctgctaaccgtcagcgcggtggatggcgtccatttctgtgcaccagtaggtcatcgccaggaagatggcgactaccgtgaatcctggcaaccacagcaaatgagcccgcttgcccttgaacgtgcgcaggagattgcccgtaaagtggtgctggcactgggcggttatgggttgtttggtgtcgagctatttgtctgtggtgatgaggtgattttcagtgaggtctcccctcgtccacatgataccgggatggtgacgttaatttctcaagatctcagtgagtttgccctgcatgtacgtgccttcctcggacttccggttggcgggatccgtcagtatggtcctgcagcttctgccgttattctgccacaactgaccagtcagaatgtcacgtttgataatgtgcagaatgccgtaggcgcagatttgcagattcgtttatttggtaagccggaaattgatggcagccgtcgtctgggggtggcactggctactgcagagagtgttgttgacgccattgaacgcgcgaagcacgccgccggacaggtaaaagtacagggttaaacccggcaaaaaaacgctacaaaaatgcccgatcctcgatcgggcattttgacttttacagcttagcgccttctacagcttcacgcgccagcttagtaatgcggtcgtaatcgcccgcttccagcgcatctgccggaaccagccaggaaccaccgatgcacagcacgcttttcagcgccaggtagtcacggtagttagccggagaaataccacccgtcgggcagaaacggacctgggagaacggacccgcgatcgcctgcagggctttcacgccgccgttagcttcagccgggaagaatttgaactctttcaaaccgtagtccatacccagcatcagttcggaaacagtgctgatccccggaatcagaggaatagtcccttcggtagcagctttcagcagcggctcggtcagacccgggctaattgcgaactgtgcacccgcttcagtgacttctgccagctgctgtggattcagcaccgtaccggcacccacaatcgcttcaggcacttctttggcgatagcacggatagcgtcaactgcacactcggtacgcagagtcacttccagaacgcgcaccccaccagcaaccaacgcttttgccatcggcaccgcgtgttccagtttttttaccacgataaccggtacaaccgggccggtggtcaggatactttctgcacttgttttccagtttttcatcagagttttctctcgcctgattacaaatttgtcgtcttaaaaagtgatacaggttgcgccctgttcggcaccggacagtttttcacgcaaggcgctgaataattcacgtcctgttcccacgcgactcgcgctcaggtcaggaatgtgcggttcgcgagcagccagttccgcttcgtctaccagcagcgtcagttcgcctgtctgtccattcacacgaatgatgtccccgtcgcgcacttttgccagcagcccgccatcgtaggcttctggtgttacgtggatagcactcggcactttaccactagcgccggagagtcgtccatcggtaactaacgcaattttgaaacaccggtccaataatacaccaagtggcggcatgagtttatgtaattctggcattccgttcgcttttggcccctgatgacggacaacaacgacacaatcgcggtccagcaaacccgcttcaaaggccggcataacgtcatgctggctttcaaaaacaaccgctggcgcttcaatcacctggttctcaaccggcacggcagaggttttcataaccgcacggcccaggttaccgcttaacacttttgtcccaccatgatgagagaaaggttgttcgaaggaagcgatcacattgctgtcgagacttttttccgccccttcccgccagtccagttcaccattattcagccatggttcaagggtataacgagacagaccaaaacctgccaccgtattgacatcttcatgcagcaggcctgctttgagcagttcacgcaccagaaccggtacgccacctgccgcctggaagtggttaatatcggccggaccgttcgggtagagacgtgccatcagcggtacaacatcagaaaggtcagagaagtcatcccagttaatctgaataccggccgcgcgcgccatcgccaccaggtgcatggtgtggttagtggaaccaccggtcgccagcagtgcaacgataccgttcaccaccactttctcatcgatcatcttaccgatcggcatccattcattaccattaccggtcatgcgtgtaacctgacgcgcagctgcggcggtcaaagcatcgcgcagcggagaatccggatgaacaaaagaagagcctggcaactgcatccccataaactccaccaccatctggttggtgttggcagtaccgtagaaagtacatgttcccggcgcatggtaagacgcggcttcactctccagtaaggccatgcggtccactttaccttcggcataaagctggcgaatacgcactttttctttatttggcaaaccgcttgccatcggtccagacggcacaaacaccgcaggcaaatgaccaaagctcagggctgccatcgtcagacccgggacaatcttgtcgcacacaccgaggaacagagcaccatcaaacatgttatgggacagccccaccgccgcagacatcgctatcacttcgcggcttagcaggctcaattccattccatcctgcccctgggtgacaccatcacacatcgccggaacaccgcccgcaacctgaccaaccgcattcgcttcatgcagggctttacgaatgatttctggatagtgttcataaggctggtgcgcggagagcatgtcgttataggaggtgatgatggcgatattgttacgcaacatgcttttcaaagaggctttgtcttctggctggcaggcagcgaaaccgtgtgccaggttaccgcatgccaactggctacgatgaacggtgctagttttcgcttgttctatccgggcgagataagcagagcgagtctcgcggctacgttcaatgattcgatttgttacgcgtaacaattgtggattcataaaggctcctgaaattgagttgtcagagcaggatgattcacaacgcgtttcattcagaggatttatgactgaaacgcctgtaaccggagctcatagggcaaaaacgtttcagtcagtgtaataaaaaaagcctcgtgggtgaatccgcacgaggcctgaaagtgtaaaaattgttctacaatctgcgcaagatcatgttaccggtaaaataaccataaaggataagcgcagatattactcaaactcattccaggaacgaccatcacgggtaatcatcgccacgctggcaacgggtccccaggttccggcctgatacggtttcggcgcatcattgtccatcgcccacgcctcagtaatggagtctacccatttccaggcttcttccacttcgtcgcgacgtacaaacagtgcctgaataccacgcatggtttccagcagcaaacgttcataggcatccgccagatgcgtctgattaaaggtttcactatagctcagatccagcttggtgatttgcaggttatgtttgtggtcaaggccaggaactttattcagtacctggatatccacgccttcatcaggttgcagacggatagtcagtttattctgcggcagatcctgccagctttctttaaacagattcagttcaggtgttttgaaatagaccacgacttcagaacatttggtcggcagacgtttaccagtacgcaggtagaatggcacaccggcccagcgccagttatcaatgtcgacgcggatcgccacgaaagtttctgtattgctgctcttgttcgcgccctcttcttccagatatcccggcacttttttgccctgggcgaagcccgcagtatattgcccgcgtacggttttttcgcgtacgttggagcggtcgatgcggcgcagagacttcagtactttcactttttcatcgcggatgctgtctgcgctcaggtcagacggcggagacatcgcaatcatgcaaagaatttgcagcaggtggttctggatcatgtcgcgcatctgaccggctttatcaaaatagccccagcgcccttcgatccccacttcttctgccacggtaatctcaacatgatcaatggtgcgattgtcccagttattcacaaacagggagttagcaaaacgcagcgccaacaggttcagcaccgtttctttaccaagatagtggtcgatacggtaaacctggcactcctcgaagtattcgccaacctgatcattgatttcctggctggtcgccaggctcgtccccagcggtttctccatgactacgcgtgccggtttagcattcagttttgcctcgccaagccctttgcaaattgcgccaaaagtgctgggcggcatggcaaagtagttaatggtgatacgatttttttgatccagcatcgcgccgagacggctgaatgcagcagtgtcattgacatcgagattacaaaaatccagacgtgcactcagggtgtcccataaaccttcatcaatggtttctttcatgaaagtttcgagcgcctcgcggacaactttggtatatgccgctttatcccagtcagcacgccctacgccgataatccgggtgtccgggttgagctgaccggctttttccagttgatacagggaaggcagcaatttacgacgcgcaaggtcgcctttcgcgccgaaaatgaccaggtcacaggcctgggctgtttgcgttaccgccatgtcattctccttaagttaactaacccggtacttaagccagggtatacttgtaattttcttacggtgcactgtactgcttttacgagcttgcgaaaactgtaaacgcttatccacccgtgcgattacgggaaaagcgcgcaaagtgcggcaaaactgataaaaaaatcatcgttttccattgggtaaaaatctgacactgatcatgttatgaaaaaaaataacaacttttttatctgcttttgtcattaacacggcacacaggcgtaatatctgacaaaactgcatttcgatttctttcagtgcggaaatcgtcattacccgtgagtctctttacatcatgaatatgctggaaaaaatccagtctcagctggaacatttgagcaaaagtgagcgcaaagttgccgaggtcattctggctagccccgataacgcgatccatagcagtattgctgctatggcactggaagccaatgttagcgaaccgacggtgaatcgtttctgtcgcagcatggacacgcgcggttttcctgattttaaacttcatctggcacagagtctggcgaatggcactccctatgttaatcgcaatgtcaatgaagatgacagcgttgaaagttacacagggaaaatatttgagtccgcaatggcaacgcttgatcatgtccgtcatagtctggataaatctgccatcaaccgcgccgtcgacttgctcactcaggcaaaaaaaatcgcctttttcggattaggctctagtgccgccgttgcccacgatgcgatgaataagttctttcgttttaatgttccggtggtgtactccgatgatatcgtgctgcaacgcatgagttgtatgaattgtagcgacggagacgtggtggtgctgatttctcacactggaagaacaaaaaatctggtcgagctggcgcagctggcacgcgaaaacgacgccatggtgattgccctcacctctgcgggtaccccgctcgcccgggaagcaacgctggcaattaccctcgacgtaccggaagatactgacatttatatgcccatggtttctcgacttgcacagctgaccgtgatagatgtgctggcgacaggatttactttgcgacgcggtgcaaaattcagagataacttgaagcgggtcaaagaagcgctgaaggaaagccgttttgataagcagttacttaatttaagtgacgatcgctaaaaacgactgtcactgtcctaatcttatacgacatccgaatgagattaatttatcgccatcgcggcgttatttcattcggatttcatgttcaagcaacacctggttgtttcagtcaacggagtattacatgtccagaaggcttcgcagaacaaaaatcgttaccacgttaggcccagcaacagatcgcgataataatcttgaaaaagttatcgcggcgggtgccaacgttgtacgtatgaacttttctcacggcagccctgaagatcacaaaatgcgcgcggataaagttcgtgagattgccgcaaaactggggcgtcatgtggctattctgggtgacctccaggggcccaaaatccgtgtatccacctttaaagaaggcaaagttttcctcaatattggggataaattcctgctcgacgccaacctgggtaaaggtgaaggcgacaaagaaaaagtcggtatcgactacaaaggcctgcctgctgacgtcgtgcctggtgacatcctgctgctggacgatggtcgcgtccagttaaaagtactggaagttcagggcatgaaagtgttcaccgaagtcaccgtcggtggtcccctctccaacaataaaggtatcaacaaacttggcggcggtttgagcgctgaagcgctgaccgaaaaagacaaagcagacattaagactgcggcgttgattggcgtagattacctggctgtctccttcccacgctgtggcgaagatctgaactatgcccgtcgcctggcacgcgatgcaggatgtgatgcgaaaattgttgccaaggttgaacgtgcggaagccgtttgcagccaggatgcaatggatgacatcatcctcgcctctgacgtggtaatggttgcacgtggcgacctcggtgtggaaattggcgacccggaactggtcggcattcagaaagcgttgatccgtcgtgcgcgtcagctaaaccgagcggtaatcacggcgacccagatgatggagagtatgattactaacccgatgccgacgcgtgcagaagtcatggacgtagcaaacgccgttctggatggtactgacgctgtgatgctgtctgcagaaactgccgctgggcagtatccgagtgaaaccgttgcagccatggcgcgcgtttgcctgggtgcggaaaaaatcccgagcatcaacgtttctaaacaccgtctggacgttcagttcgacaatgtggaagaagctattgccatgagtgcaatgtacgcagctaaccacctgaaaggcgttacggcgatcatcaccatgaccgaaagcggtcgtaccgcgctgatgacctcccgtatcagctctggtctgccaattttcgccatgagccgccatgaacgtacgctgaacctgactgctctctatcgtggcgttacgccggtgcactttgatagcgctaatgacggcgtagcagctgccagcgaagcggttaatctgctgcgcgataaaggttacttgatgtctggtgacctggtgattgtcacccagggcgacgtgatgagtaccgtgggttctactaataccacgcgtattttaacggtagagtaagtacgttgccggatgcggcgaaaacgccacatccggcctacagttcaatgatagttcaacagatttcgaatattctgaagcaaacttgaacttatcatcaggcgaaggcctctcctcgcgagaggcttttttatttgatgggataaagatctttgcgcttatacggctggatttcgcccggtttgcgagttttcagcaattttagtatccaggtgtattgttctggtcgcggaccaacaaaaatctcgacttcttcattcatccgccgcgcaatcgtatgatcatccgcctctaacagatcatccatcggtgggcgcacctgaatcgtcagacgatgcgtcttgccatcataaatcggaaacagcggtacaacgcgcgcacggcacactttcatcaaacgaccaatcgcgggcaacgtcgctttataggtggcaaagaaatccacaaattcgctgtgctctgggccatgatcctgatcgggtaaataatatccccagtacccctgacgtacgctctggatgaatggtttaataccgtcatttctcgcatgcagacgaccgccaaagcgacgacgcaccgtgttccagacataatcaaaaaccgggttgccctgattatggaacatcgctgccattttctgcccttggctggccatcagcatggcaggaatatcgacggcccaaccgtgcggcaccagaaagataactttctcgttattacgccgcatctcttcgatgatctccagcccttgccagtcaacgcgcggctgaattttctccggcccgcgtattgccaactcagccatcattgccatcgcttgcggcgcggtggcaaacatctcatcaacaatcgcttcgcgttcagcttcactacgttctggaaagcagaggctcagattgattaacgcacgacggcgactgctttttcccagtcgtccggcaaaacgtcccagccgtgccagaatgggatcacggaactttggcggcgttaaagcgatacccgccatcgctgctacgcccagccatgctccccagtagcgcgggtggcgaaaggatttatcaaactcaggaatgtattcgctattattttttttcgtttccatgcttttccagtttcggataaggcaaaaatcaatctggtgatagtgtagcggcgcaacttgccccgcaccaaataaaaaaagccggtactgactgcgtaccggctgcgaatggatgttaattaatcaaaccgtagctgcggcacaatctctttggcctgcgccaggaattcgcgacgatcggagccggtcagcccttcggtacgcggcagttttgccgtcagcgggtttacggcctgctggtttatccatacttcatagtgcagatgcggcccggtactacgtccggtattaccggaaagcgcgatacggtcgccacgtttcaccttctgtcccggtttcaccagaatcttgcgcaagtgcatataacgcgtggtgtagctgcgaccatgacgaatagccacataataacctgctgcgccactgcgtttggcaaccaccacttcaccgtcacccacactaagcactggcgtaccctgcggcatggcgaaatcaacacctctgtgtggtgcaacgcgaccggtcaccggattagtacgacgcgggttaaaattagagctgatacggaactgtttcgccgtcgggaatcgcaagaatcctttcgccagaccagtaccgttacgatcgtagaatttgccatcttcagcgcggatagcgtaataatctttaccttcactacgcaaacgtacgcccagcagctggctttgctcacgtttaccatcaagcatttctcgagacattaacaccgcaaattcatcgccttttttcagtttgcggaaatccatttgccactgcatggctttaatcactgcgctcacttcggcgctggttaaaccggcgtttctggcgctggcaacaaagcttcccccgacggtacctttcagcagattgttaacccactctccttgctgcatttcgctggtcattttaaaaccgttagcggcagtacggtcataggttcgggtttcacgacgagacacttcccaggtgaggcgctgcagttcgccgtccgcggttaatgtccaggagagttgttgaccgattttcaggttacgcaattctttgtcggccgcagccagttgggtgatatcacccatatcaataccatactgattgagaatgctgcttagcgtatcgccagtggaaacaacatattcatgcacgcccgcttcaccggcgattttgtcatccagttcgtcctggggaatggcttcatcttcttgtgcagcttgatcaatcggctcactggcttcaggtaagaggctacgaatttcgttctgttccagctcaatggttttgacaattggcgtggcatcacggtgataaacataaggccgccagacagcgacggccagagtaagaacggtgaggctccccaacataacgcggtgtggtcgcggtaaattattaaacgccagggcgacagagcgggctatctgttgcacgtaatcacttcctcattaatctcctttcaggcagctcgcatactggttggctaattgactcaggaattcactatagcttgttttacccagtttgatattcgtccccaggggatccaacgttcccatacgaacggatgtccctcgtgcgacgctctcaacgaccgctggcctgaactgtggctcagcaaaaacgcaggttgctttttgctcaaccaactgtgttcttatttcatgtaaacgctgcgcgccaggttgaatctcagggttaacggtaaaatgaccaagcggtgtcagtccaaactgtttttcgaaatagccgtaagcatcgtgaaaaacgaaataacctttccccttgagcggcgcgagctcgttaccaacctgcgtttcggtactggctaattgtgcctcaaaatccttcaggttggcgtcaagtttggctcgactttgcggcataagttccactaattttccatggattgcaaccgctgtagcccgcgctatctctggggaaagccaaagatgcatgttgaaatcgccgtgatggtgatcttcgtcacttttttccgcgtggtcgtgatcatcatcatcgccgtgaatacttttcatcagtagcggtttcacatcttcaagctgcgcaatcgttacctgcttcgctcctggtaatttgcttaccggtttttgcataaacgcttccatctccgggccaacccaaacgactaagtccgcgttctgtaagcgttttacatcgcttgggcgcagactataatcatgttcactagcgccgtcaggaagtaaaacctctgtttctgttaccccatcagcaatggcagaagcgatgaacccaacgggtttaaggctagcgacaacggcggcatctgcggcctgtgttgcacctccccagagagcggcggataatgctgcgaaaagaagcgtttttttatgtaacataatgcgaccaataatcgtaatgaatatgagaagtgtgatattataacatttcatgactactgcaagactaaaattaacatgacaagtctggtttccctggaaaatgtcagcgtttcttttggccaacgccgcgtcctctctgatgtgagcctggaacttaaacctggaaaaattttgactttacttgggccaaatggcgcaggtaagagcacactggtacgggtagtgctcgggctggtaacacccgatgaaggggttatcaagcgcaacggaaaactgcgcatcggctatgtaccgcagaagctgtatctcgacaccacgttgccactgaccgtaaaccgttttttacgcttacgccctggtacacataaagaagatattttgcctgcactgaaacgtgtccaggccgggcacctgattaacgcaccgatgcaaaagctctctggtggcgaaacgcagcgtgtactattagcgcgagcattgttaaatcgcccgcaattattagtgctggatgaacccactcaaggcgtggatgtaaatggccaggtggcgttatatgaccttattgaccaactgcgtcgtgaactggattgtggcgttttaatggtttctcacgatctgcatctggtgatggcaaaaaccgatgaagtgctgtgcctgaatcaccacatttgttgttccggcacaccggaagttgtttccctgcatccggagtttattagtatgtttggtcctcgtggtgctgaacaactgggtatctatcgccatcatcataaccatcgtcacgatttacagggacgaattgttttgcgtcggggaaatgatcgcagttgatttaacgtcggggaaatgatcgctcatgattgaattattatttcccggttggttagccgggatcatgctcgcctgtgccgcgggtccgctgggtagctttgtagtctggcgtcgtatgtcttatttcggtgatacgctggctcatgccagtttacttggcgtcgcgtttggtttgttgctggacgtgaatccattctatgcggtgattgccgttacgctgctgctggcgggcggtctggtatggctggagaagcgtccacagctggcgatcgacacgttattagggattatggcgcacagtgccctgagcctgggcctggtggtcgtgagtctgatgtctaatattcgtgttgatttgatggcttacctgttcggtgatttgctggcagtgacgccagaagatctcatctctattgcgattggcgtggtcatcgtggtggctattttgttctggcaatggcgcaatttgctgagtatgacgataagcccggatctggcgtttgttgatggtgtgaaattacagcgagtgaaattgttgttgatgctggtgacggcattgacgattggtgtagcgatgaaatttgtcggtgcgttgattattactagcttgctgattattcctgctgctactgcgcgtcgctttgcccgcacgccggaacagatggctggtgtcgctgttttggtggggatggtggcagtgactggcggtttaaccttttccgcggtttacgatacgccggcgggtccgagcgtggtgctatgtgcggcactgttatttattctcagtatgatgaaaaagcaggccagctaatctatcgctgaacacatttgtcggatgcggcgcgagcgccttatccgacctacggttcggtatctctggtagtcctggtaagacgcgaacagcgtcgcatcaggcatattgccagtgccggatgcggcgcgagcgaccaatccgacttacggcatttctggcggcgttatgccaaagtgattccacgcccgcgtcgtcgccatacgcccacgcggtgtacgctgcaaaaagccttgctgaatcaaataaggttccagcacatcctcaatggtttcacgttcttcgccaatggctgccgccaggttatccagacctacaggtccaccaaagaacttatcgattaccgccagcaacaatttgcggtccatataatcgaaaccttcagcatcgacattcaacatatccagcgcctgagcagcgatatctgcgctgatggtgccatcgtgcttcacttcggcgaaatcacgcactcgacgcagcagacggttggcaatgcgcggcgtaccgcgagcgcgacgagcaacttccagcgcgccgtcatcactcatctcaagccccataaagcgtgcgctgcgactgacgatatattgcagatccggcacctgataaaactccagacgttgcacaataccaaaacggtcgcgcaacggacttgtcaggctacctgcgcgcgtggttgcaccaatcagggtaaacggcggcaaatcaattttaatggagcgtgccgccggaccttcaccaatcatgatatccagttggtagtcttccattgccgggtacagcacttcttcaacaactgggcttagacggtggatctcatcaataaacagcacgtcatgcggttcaaggttagtgagcatcgcagccaaatcgcccgccttttccagcaccggaccagaagtcgtgcgtaaattaacgcccatttcattggcgacaatgttggcaagcgtagttttacccaaccccggaggaccaaaaatcaacaaatgatcgagggcatcgccgcgcagtttcgctgctttgatgaaaatctccatctgactacgaacctgcggctgaccaacatactcttccagtaatttggggcgaatggcgcgatctgctacatcttccggcaaagtggtaccggcagaaatcagacggtctgcttcaatcatcctttacctcataacgcggcgcgtagggcttcgcgaattaaagtttcactgctggcgtcagggcgagcgattttgctcaccatgcggcttgcttcttgtggtttatagcccagcgccaccagcgcggcaaccgcttcttgttcagcatcgtcggtcgccgggctggcaggagacgtgagtaccaggtcggcggctggcgtaaagagatcgccatgcaaacctttaaatcggtctttcatttcaacaatcaagcgttcggcggtttttttgccaatacccggcagtttcaccagtgcccccacttcttcacgctcaacggcattaacgaactgctgcgcactcattccggagaggatcgccagcgccaacttcgggccgacgccgttggttttgatcaactctttgaacaatgtgcgctcttgtttattgttaaaaccgtacagcagttgcgcgtcttcacgcaccacaaagtgggtgaaaacgatcgcttcctgacccgcttcagggagttcataaaaacaggtcatcggcatatgcacttcatagcctacgccgcccacttcaattaacaccagcgggggttgtttttcaatgatgatgcctctgagtctgcctatcacatgacgctcctgcgtaatgaatcaaagataatgctgtatgataaaaaaatgctggatagatatccagcgaaggatgaagaaaacttgcgaggtgtctcgatgaactgaaaaatggcacagtataatttattctacaggttatattggaagcaaatattttaatattacatattcagtgaagaaatgcgtaataaaaatatacattgcgcctcctgaaaaaataaattttttatgctattacgtatatttgtatctatttcaatggaatgacaacgtgaatattaattaccctgctgaatatgaaattggagatatcgtctttacatgtataggtgctgccttatttggtcaaataagtgctgcaagtaattgctggagtaatcacgtcgggatcattatcggtcataacggtgaagacttcctggttgcagaaagccgggttccccttagtaccatcaccacgctatctcgttttattaaacgtagctctaatcaacgctatgctataaagcgattagacgctgggctgacagaacgacaaaaacaacgaattgttgaacaggttccctcccggctacgcaaactttaccacaccggttttaaatacgaatctagccgccagttctgtagtaaatttgtttttgatatttataaagaagcgctatgtattccggtgggtgaaatagagacgtttggagaattgttaaatagcaatccgaatgcaaaactcactttctggaaattctggttcctgggttctattccgtgggagcgtaaaaccgtcacgccagccagtttgtggcatcatccgggtttggtgttgattcatgcggagggagtggaaacgcctcagccggaactgaccgaggcggtataacttaacgcagtcgccctctcgccaggttcagccggctttcgctcatctgcatcgcattctgactaacgtggcagtgggtgatagcaatcgccagcgcatcggcggcatccgcctgtggattagcgggcagtttcagcaaggtgcggaccatatgctgcacctggcttttttcggcactgccaatacctaccaccgtttgctttacctgacgtgccgcgtattcaaatactggcaactcctgattcaccgccgccacaatcgccacgccgcgcgcctggcccagtttcagggcactgtcagcgttctttgccataaagacttgttcaatggcgaaataatcaggctggaactgggtgatgatttccgtcacgcccgcatagatgagtttcagacgagacggtaaatcatccactttggtgcggatgcatccgctacccaggtaggacagttgcctacctacctggcggatgacgccgtagccggtcacgcggctacccggatcaatgccgagaataatagccatcacgcgtctccgttttgctgtttagcaggcctcatcagagagtcgctgcgacctcatcagagatttcaccgttatggtaaacttcctgcacgtcgtcgcaatcttccagcatatcgatcagacgcatcagtttcggtgcggtttctgcatccatatcagctttggtagacgggatcatggaaacttccgcgctgtctgctttcagacctgccgcttccagagcgtcgcgcactttacccatttcttcccatgcagtgtagacatcaatcgcgccgtcatcataggtcacaacgtcttcagcacctgcttccagtgctgcttccatgatggtgtcttcatcgcctttctcgaaggagatcacgccttttttgctgaacagataggcaacggaaccatcagtaccgaggttaccgccacatttgctaaatgcatgacgcacttcagcaacggtacggttgcggttgtcagacagacattcaatcatgattgccgtgccgccaggaccgtaaccttcgtagatgatggtttccatgtttgcatcatcatcaccgcccacaccacgtgcaattgcgcggttcagtgtgtcacgggtcatgttgttagacagtgctttatccaccgccgcacgcagacgcgggttagcgtccggatcgccaccgcccagcttagccgcggttaccagctcacgaatgattttagtgaagattttaccgcgcttagcatcctgcgcagctttacgatgtctggtgttggcccatttactatgacctgccataaaaatatctccagatagccctgcctgttcaggcagcgttaattacaaactgttcaatcgcctgccggttgctccaggacttagtgagcgccgccgcagcaggcgcatcaagccacttgtaagccagatgttcagtgaaaacgatctgccgctcgtgcggaagcgcaagacagaaccaactttccgtattacgcgtcacgcccggcgcatagcgatgacgtaaatgactaaaaatttcaaactctaccgtgcgctgacagtcaattaaggtcagttgttcagcgacaacatcaatggtgacctcttcctttacttcgcgcatggcagcttgcggcgcggtttcaccctcttccacgctgccggttacgctctgccagaaatcgggatcgtcacgccgctgcaacatcagcacccgtttcgtatcttgtgcgtagatgaccactaagatgctaacgggacgcttatacactttatccttcacgctgcctcttcgttgactgccttcgctcatcccattcacatagttatctatgctcatgggagttcactcagttgccgcctcgatgcaacgcgaatgatttcgtgtatttgagtcatatcagttattctcagccttcttcacaacctgaatgctcagctcagccagtgcagtcgggttagcaaagctcggtgcttcagtcatcagacacgctgccgccgtggttttcgggaaggcgataacgtcacggatattgtcggtgccggtcagcagcatggtcagacggtcaagaccgaatgccagacctgcgtgcggcggagtaccgtatttcagagcgtcgagcaggaagccgaatttctcgcgctgttcctcttcgttgatacccagaataccaaacaccgtctgctgcatatcaccattatggatacgtacactaccaccgcccacttcgtaaccattgatgaccatatcgtaagcgttcgccaccgcattttccggtgcagctttcagttctgcagccgtcatatctttcggactggtgaacggatggtgcattgccgtcaggccgccttcaccgtcgtcttcaaacatcgggaagtcgataacccacagcggtgcccatttgctttcgtcggtcagaccaaggtctttacccactttcaggcgcagtgcacccatcgcgtcggcaacaattttcttgttgtcggcaccgaagaaaatcatatcgccatcttgcgcggcagtacgatccaggatgtcttcgatgatttctgcattaaggaacttcgctaccgggctgttgataccttccagacctttcgcgcgttcgttaactttgatgtaagccagacctttcgcgccgtagattttaacgaagttaccgtattcgtcgatctgcttacgggtcaggcttgcgccgcccggaacgcgcagagccgctacgcgacctttcggatcgttcgccggacctgcaaatacagcaaactcaacagatttcagcagatcagcaacgtcagtcagttccatcgggttacgcagatccggtttatcagaaccataacggcgttctgcttccgcaaaggtcattaccgggaaatcgcccagatccacacccttcacttccagccacagatgacgcaccagcgcttccatcacttcacgcacttgcggcgcggtcatgaaagaagtttccacatcgatctgagtaaattcaggctgacggtcagcacgcaggtcttcgtcacggaagcatttaacgatctgatagtaacggtcaaaaccggacatcatcagcagctgtttgaacaactgcggggattgcggcagtgcgtagaatttacctttgtgcacacgagaaggcaccaggtagtcacgcgcgccttccggcgtggctttggtcagcatcggagtttcgatgtcgaggaagccgtggtcatccataaaacggcgcaccaggctggtgattttagcgcgggttttcaggcgctgagccatttccggacgacgcaggtcgaggtagcggtatttcagacgcgcttcttcggtgttgacgtggttagagtcaagcggcagaacatctgcgcggttgatgatagtcaggctggacgccagcacttcgatttcgccggtcgccatatcgcggttaatatttttttcgtcacgcgcacgtacggtgcccgtgacctgaatgcagaactcattacgcagttcagaggccagctttaacgcgtccgcacgatccggatcgaaaaatacctgcacgataccttcgcggtcgcgcatatcgatgaagatcaggctaccaagatcacgacgacggttgacccaaccacacagagtcacctgctgccccacgtgggacaaacggagctgtccacaatattctgtacgcatgagatatcccttaacttagctgccggcggatgccccctgctgcgcaggtgaccaagtcgcagcgttagctgtatgtcacaactgaatgaaaaaaggcggctattatactggaaattctgccgcaccgtaagagcctggcccgcgctggaacgcctcgttaccactttatatcgggcctgaaatcagactctacgccagtttgctataaaggtgttgcccgaactcataaaaattaacaaaatttgtcgttccgccatcggctaatcgcattaaggtgtgaggcacgattttgttttttcaggagtcattatgcttgaacttaatgctaaaaccactgcgctggtggtgatcgatttacaagaaggcatcttaccttttgccggtggtccacatactgccgatgaggtagttaatcgcgccgggaagctggcggcgaaatttcgcgccagcggtcagcccgtgtttctggtgcgcgttggctggtctgccgattacgctgaagcattaaaacagccggtcgatgcgcccagtccggctaaagtgttgcccgaaaattggtggcaacatcctgctgcattaggtgcaaccgacagcgatatcgaaatcatcaaacgtcaatggggtgcgttttacggtacggatctggagttgcaattacgccgccgaggtatcgatacaatagtgttatgtgggatcagcaccaatatcggtgttgaatccaccgcccgcaatgcctgggaacttggctttaatctggtgattgccgaagacgcctgtagtgccgccagcgccgagcagcacaataacagtatcaaccatatctacccgcgcatcgcccgtgtgcgtagcgtggaagagatcctcaacgcgttatgatttacatcggtctaccgcaatggagccatcctaaatgggtgcggttggggatcaccagccttgaagagtatgcccgccactttaactgcgtggagggcaacaccacgctttacgccctgccgaaacccgaggttgtcctgcgctggcgtgagcagaccacagatgacttccgcttctgttttaagtttccggcgaccattagccatcaggcagcattacggcattgcgatgatttagtgactgaatttttgacccgcatgagtccgttggctccgcgcattgggcaatactggctgcaactgcctgccacattcggcccacgggagctgcctgcgctttggcattttctcgattctcttcctggcgaatttaattatggcgtggaagtccgccatccacagtttttcgccaaaggagaagaggaacaaacgcttaatcgcggtttacatcagcgcggcgttaatcgggtgattttagacagccgcccggttcatgcagcacgtccacacagtgaagctattcgcgacgctcaacgaaaaaaacctaaagttccggtacatgctgtactgacggcgacaaatccgctgatccgttttatcggtagtgatgatatgacgcaaaaccgggaattatttcaggtctggttacaaaaattagcgcagtggcatcagaccactacgccttatctttttttacatacgccagacattgcccaggcaccggaactggtacataccctgtgggaagacttacgtaaaacgcttccagagatcggagcagttccggctattccacagcaatcttctcttttctgaatttgccacctatcatagacaggtgccatcggccattttaaagggagtttgtatggtaagcgcgctgtacgccgttttaagtgcgttgttattaatgaagttctcttttgatgtcgttcgcctgcgaatgcagtaccgcgttgcctatggcgacggcggttttagcgaactgcaaagcgctattcgcattcatggtaacgcggtggaatatattcccatcgcgattgtgctgatgctgtttatggaaatgaatggcgcagaaacctggatggtgcatatttgcggcatcgttttgcttgctggtcgtctgatgcattattacggttttcatcaccgtctgttccgctggcgacgttccggcatgagcgccacctggtgtgcgctgttgctgatggtgctggcgaatctttggtatatgccctgggagttggttttctccctgcgttaacgcacaatacgccactttctttttcccggatttttacgttatgtctcaccgcgacacgctattttctgcccctatcgccagactgggcgactggacctttgatgaacgggtagctgaagtcttcccggatatgatccagcgttccgtacccggctattccaatattatttccatgattggtatgttagccgagcgcttcgttcaacctggtacgcaggtttacgatctgggttgttctctgggcgcggcgacgctcagcgtgcgtcgcaacattcatcatgataattgcaaaattattgccatcgacaactccccggcgatgattgaacgctgccgtcgtcatattgacgcctataaagcccctacgccagtagacgtcattgaaggtgatattcgcgatatcgccattgaaaacgcaagcatggtggtgctgaattttaccctgcaattcctggaaccttccgagcgccaggcgttactggataaaatttatcaagggctgaaccccggcggcgcgctggtgcttagcgaaaaattcagtttcgaagatgccaaagttggtgaactgttgttcaacatgcaccacgactttaaacgtgccaacggttacagcgaactggagatcagccagaagcgcagcatgctggaaaacgtgatgctgaccgattccgtggaaacccataaagcacgcctgcataacgccggttttgagcatagtgagctgtggttccagtgctttaactttggtagtctggtggcattaaaagcagaggacgctgcatgatcgactttggtaacttttattctctgattgccaaaaatcatcttagtcactggctcgaaacgctgcccgcgcagattgctaactggcagcgcgagcagcagcacgggttgtttaagcagtggagtaatgcggtggagtttctacctgaaattaaaccgtatcgtcttgatttattgcatagcgttacggcagaaagcgaagagccactgagcgcagggcaaattaaacgcattgaaacgctgatgcgcaacctgatgccgtggcgcaaagggccgttcagtctgtatggcgtcaacatcgataccgaatggcgttccgactggaaatgggatcgtgttctgccccatctttctgatttaaccggacgcaccattctggatgtcggctgcggcagcggttatcacatgtggcgcatgattggcgcaggcgcgcacctcgcggtggggatcgaccctacgcaactgtttctgtgccagtttgaagcggtgcgtaaactactgggtaatgatcagcgcgcgcatttgttaccgttaggtattgaacaacttccggcactgaaagcctttgataccgtctttagcatgggcgtgctttaccatcgccgtagtccgctggagcatctatggcagttgaaagatcaactggtcaatgaaggtgaactggtgctggaaacgctggttattgatggtgatgagaacacggtgctggtaccaggcgatcgttacgcgcaaatgcgtaatgtctatttcatcccttccgcgctggcgctgaaaaactggctgaagaagtgtggttttgtagatatccgcattgcggatgtgagcgttaccaccacagaagagcagcgacgcaccgaatggatggttaccgaaagcctggccgatttcctcgacccacatgatccgggtaaaacggtggaaggttatccggcacctaaacgcgcggtgctgattgcgcgcaagccgtaaaggtctggtattactgccggatgcggcgtgaacgccttatccggcctacaaaaccttgctaattcaatatattgcagggactatgtaggcctgataagcatagcgcatcaggcagctttacgtttgcataacctcagcgcccgtttccgggcgctattcacgtcttacgcctgaacagctggctgatcaaacgccgttaacttcggtgcattgcccgtatatttttcgatatacaccaacgcactgttaccggcacaggcatttgccagctggctgctggggatatccgccgttaacacgttcgcactgccgtttttacacaagccattttccagatctggccatgcaccttcatgcacgcataccacgccttttttgatcccgtcagtcaccaccgcgcctgtcaaaatctgaccacgtttgttccagacacgcaccagatcgccattcgcaataccaaagcgtgcagcatcttcggtgtgaatagtgattggttcacgatcggcgatcgcatattttttacgcagttccgcatagttaagctgactgtgtaaacggtgtgccggatgtgcggtcagaagctgtaactgcttctcgtcggcggtacctttccattcatcaggagccagccaggttgggtgtgccgggcaatccttatagccaaatttttccaacgttttactatagatttcaattttgccgcttggcgtacccagcgcatttttcaccggatcggcgcggaaatcaccataacgaacgtactgttcgttcttctcgctgtggcgcatttcgatcagtttattttgctgccagaaggcattaaacattggcatagtgacgcgttgcgcacgggcacctttctgagcggcatcatagaaaaatttcagccacgccatttcatctttaccttcggtatagatctcttttccgccaggtttgagtaattccgcaagatcggcaaacacgtcaaaatcgttacgcgcttcaaattgcggagcaacagcctgcttcatcggcacaatatgctggttgctgtaatcaccggtcatcgtcaagtcattgcgctcaaagcttgtggtgatcggtaatacgatatctgcgtgtttggctgctgcggtccagtagcattcagaaacgacgatcatctccggtttctgccatgctttaatcagacgattagtatcctggtgatgggtaaagttaccgccacccgcccaccagatcattttgatattcggatacgtttgttctttaccgttatgctgatatttgccgccaggattttccagcgcatcgacgatacgggcaacaggaatcgccgtcattccgccatcatcagcggcctcgctggcatgtccggcaatcgccgcagacatttccggcagcacgccgccaacacgcgtcgggttgccaccgttggagtaatgataagagaaaccaaaaccgccgcccggtgtaccaatctgccctaacatcgccgccagcgtcaccagcatccagtgtttctgttcaccatattgctggcgctgaattccccagcctgccatcagcattgtgcgattcgccgccatcagttcagcgagtttgactatctgcgcttccggtacgccagtaatttccgccgcccagaccgcgctcttcggcgtattatcgctcttacctgtcagatactcttcaaactgcggatacccggtagtgtatttttcaaggaacactttatcgtgtttgccttgtgtcatcagggtatgcgcaatccctaacatcagtgccacgtcggtgcccatattcggcgcgatccaggtggcattatcgtcaaagaattcgatggtttcggagcggataggatcaatggcaatcactggtttgccagattttttcagctgatggaagtattccagcccttgctcatcggtactgctccaggcaatttttaaggtattcagcgggttcattccccacagcaccacaacctggctgttttccagaatcagcggccaggaggtctgctgttcatacacctctacagaaccgaccacatgcggcatgatcacctgtgctgccccggtactataatcgccgctatgcccggaataaccgcccgccaggttcatataacgttgcagtaaggtttgcgctttatgcaacacgccagaagagcgccagccgtaagatccggcaaaaatggcgcttggtccgttagctttacgaatacgatcatgttgctcatgaatcagttttaatgcctgttcccagctcacctgtacataggtatcttcgccacgacctttcgccggttgcagtggattatcgagatagctttttctcaccatcggatgctgaatacgcgccgtggtgtgtacctgatccgccgccgtagactgtaaggaattcggtatggttttcgccagcgcgcctgtactagaaacaatcttgccgtccttcacttctacgttcatcgctccccaacgtcccgcggtgaggattttaccgcccttctcttctgcccatgcggggagcggtgctgcgcttgtcaccaccagcgctccagcggcaataccgctgtgtttaataaattcacgtcttgttaatgtcataacttcctccctgatcaacgaggatcactgtttctcggtaatatctttggcgttgtactggaaataccgcgttaaaatgtccagttcgttttcgctcatgctggttcgtgcccccattcctttggcaatggacggccacgcattgacggtgtaatggtcggcggcaataggggcatgacaaccagcgcaataggtatcgtcaagtttttcagcgtattgccatagcggtttacggtccgctaatgcgggatcggtaagcgcaccctgtaaagacgcctgacgccattgattgccgtattcgtcagcctgccattccccgtttacagtgagcgccttgataccttcttcacttaatgtggctagcgccagccgttgacctgccgccaggtagagcgtgttttcactgccctgcatttgataaccctgcaacagaacgatcggctgtttgccactggcatcaacgacggtgagatcggttccaggattcacggtagccagctcgcctatgtgagaagttttgaaaggataaatatgtgcgccattagtaacactagtagcggcctgactttccagctcatgcgccgcgttgtcatccatttttatttctggcggaaaatgggcaatgcctttatgacaatcgatacaggtttcgctgtccttttgtgctttgttatgcattttctgcgcagattcactttggctggcaatatccatggcatcaaaagaatggcaactacggcacgttgcagagtcagtggcttttaattctttccatactgtttcggccatttcctggcgatgagcttcgaacttatcgtcactgtctattttgccgctaacaaattcatgataaatatctttagatgcctttaatttagcaaataaataatccatcccactctttggaatatggcaatcggcacattccgcacgtatccctttctggttgctaaagtggacagttccctgatattcctcaaaaggtttactcatgctgtggcaggaaaggcaaaatgctgtatcgctcgttttatgtaagactttttgcgccagcaataacccgccgccaccaaccacaaccgctatcagcaaaaacaataacccaatgcgttttttccctcgcatagattcctctaattaaattactggacaccgaaatcattgtataattaaatatacaacgaattaaccgcttgcataattaggcacaacactgcctgaaacaatcgataaagaatatgatttattacaatgtaatcattaattgctaaggaataacccagttgctatttagaatatatatttatcagttttagtaatttaaatcccataattaatgtgaatatatacaatatttttagcacaacgctatgcgcactgtcacccgctcaacagatcacggttatcgttcgttttttatactgttcagggataaaaaaaggcccctgttgaaattgcaggggcctggtacgagcaagcatcatattgggcgacatgatgcaacggtaaaaatcatttggcctgatggcgttcaatgattcctttcatttcagcaaccgccgccccgtctacgatataacggctatactcgtccgcgtgttcatcactactcatggacaatccttgattacgataacgcatcggactggcttgccacgctcccgcggagctatggacttccagcactccggcatcgaggaagtggtgcaggttttctgcacggactcctgctccggccataatgattggagcatcacgatgggcaataagttccataattttacttaaaccttgcagtgcgtcacttttttgcccacttgtcagtacccgggcaatgcccaattccgcaagattattgagtgtatataaagggttagcgcacatatcgaaggcgcgatgaaaagtcactgccagcggaccggcagcagccattattttttccattcgtggcatatcgacattcccgtcaacatcgagaacgcccgtcaccagtccaggaaaacctaattcgcggaccgtgcgcacatcctcaagaatggcggcaaactcaccgtcgctgtagcaaaaatcaccaccgcgtgggcgaattatcggatgcacagggatcgtcacccgctggcgcacggatttcagtacacccaagctcggcgttaagcccccctcttttggggctgcgcataattcaactctgtctgcgccgttttgctgcgccgttagtgcacattccatgctgtaacagcaaatttccagtaatgccatttttactccttaattacgcgctctgctcgctggcaacgatctcttcaatggaccacggatgaaacttaatagttgttttgccatcggtgaccgccagcgtcggattcggtaatcgctcatgctcaccttttgggctactggttttcacactgatccccggtaggctgagtccttcatcagaaagcaatgccagcgcacgggcattcagcgtttctggatcacccggcagaacgatttcaatatgttcccaaccttcgtgtgggtaacgtttttccccgggccacggtagctccacaatagaaaactgccagtgcgcaacctgtaccggttcatgcaatttaaacagacaaatcggtctgccattgatcatattttcactcaaaagctcgccacactgttcaaacccgcgacgccagcgttcagcagtggcgttttgatggcaacgcaaagaaatgtgatcggcagtcagcggagtgatattcaaccccagacggcgggaaagttcatctaatgcgtggataaatcgcggtaaatcgcttgcaatatcctgcagctcgtcgatagattgccagttcgccataatcactcttcgtctttcagtaaaagcgttaatttaccctgttgccctgtgccaaccaaccgctgatttcacgccgcttctgatgcaatagtgaaaacggcaatacgccacgcgcacgttgctgacgaaaacagccatttgcagtatactcccgccctaatttctttaactggtgcgggcaatttttgctcgcttcatcaatgtaaggtattccggtgaatattcaggctcttctcagtgaaaaagtccgtcaggccatgattgcggcaggcgcgcctgcggattgcgaaccgcaggttcgtcagagtgcaaaagttcagttcggcgactatcaggctaacggcatgatggcagttgctaaaaaactgggtatggcaccgcgacaattagcagagcaggtgctgactcatctggatcttaacggtatcgccagcaaagttgagatcgccggtccaggctttatcaacattttccttgatccggcattcctggctgaacatgttcagcaggcgctggcgtccgatcgtctcggtgttgctacgccagaaaaacagaccattgtggttgactactctgcgccaaacgtggcgaaagagatgcatgtcggtcacctgcgctctaccattattggtgacgcagcagtgcgtactctggagttcctcggtcacaaagtgattcgcgcaaaccacgtcggcgactggggcactcagttcggtatgctgattgcatggctggaaaagcagcagcaggaaaacgccggtgaaatggagctggctgaccttgaaggtttctaccgcgatgcgaaaaagcattacgatgaagatgaagagttcgccgagcgcgcacgtaactacgtggtaaaactgcaaagcggtgacgaatatttccgcgagatgtggcgcaaactggtcgacatcaccatgacgcagaaccagatcacctacgatcgtctcaacgtgacgctgacccgtgatgacgtgatgggcgaaagcctctacaacccgatgctgccaggaattgtggcggatctcaaagccaaaggtctggcagtagaaagcgaaggggcgaccgtcgtattccttgatgagtttaaaaacaaggaaggcgaaccgatgggcgtgatcattcagaagaaagatggcggctatctctacaccaccactgatatcgcctgtgcgaaatatcgttatgaaacactgcatgccgatcgcgtgctgtattacatcgactcccgtcagcatcaacacctgatgcaggcatgggcgatcgtccgtaaagcaggctatgtaccggaatccgtaccgctggaacaccacatgttcggcatgatgctgggtaaagacggcaaaccgttcaaaacccgcgcgggtggtacagtgaaactggccgatctgctggatgaagccctggaacgtgcacgccgtctggtggcagaaaagaacccggatatgccagccgacgagctggaaaaactggctaacgcggttggtattggtgcggtgaaatatgcggatctctccaaaaaccgcaccacggactacatcttcgactgggacaacatgctggcgtttgagggtaataccgcgccatacatgcagtatgcatacacgcgtgtattgtccgtgttccgtaaagcagaaattgacgaagagcaactggctgcagctccggttatcatccgtgaagatcgtgaagcgcaactggcagctcgcctgctgcagtttgaagaaaccctcaccgtggttgcccgtgaaggcacgccgcatgtaatgtgtgcttacctgtacgatctggccggtctgttctctggcttctacgagcactgcccgatcctcagcgcagaaaacgaagaagtgcgtaacagccgtctaaaactggcacaactgacggcgaagacgctgaagctgggtctggatacgctgggtattgagactgtagagcgtatgtaatcgatttttcgtgagagtgaagcctgatcagggttagccgatcaggcttttttattgccatctaaatgtattctgaaaatggacatgccattgttttctcactgttggataagaggccagaagcgtaatatccggccccagggaaacgataacggttgaatttaaggaataccgcagtgtttaaatttcttgtattaacattaggcattatctcttgccaggcttacgcagaagatacggttatagtaaacgaccatgacattagtgccatcaaagattgttggcaaaaaaatagtgatgatgatactgacgttaacgtgatcaaaagttgcctgcgacaagaatacaatctcgtcgatgcgcaattaaataaagcctatggtgaagcttatcgttatatagaacaagtgccacgcacaggtgtaaaaaaacctgataccgaacaacttaacttgcttaaaaaaagtcagcgagcctggctggattttagggacaaagaatgtgaattaatccttagtaatgaggacgttcaggatttaagtgacccttattctgaaagtgaatggctcagttgtatgatcatacagaccaatacgcgaactcgccagttgcagctataccgtaactctgaagatttttatccaagccctttgacaagaggataattcacatctttttggcatgttttgttgcaagctattcctgataaataattgcaacaagacatcgagcctttttcactgagttattaaacatactcgcgagcgcgtcgctacgctagcaagcaaaaatgaaacaggaataatcgaaatgggatgttgcgcacagtcaaaataactcaccgtaaataatcatctgctataaataatcactttcatgcaataccagataagctatttttaaacagacacttaccgcacaacaaactaattaaatacaaagaaaggcaacaatcaacttaatgttaatgaaatgttttacatatattaaccacttgtttaatgcggagaatcagtacactattttcttataattacatttgaaattatatgatcaccgggagtgattgattaattatctttactaataatcagactaatatttacctgtttgaccgagttgggattgcgtcgtttctccattaggagtaaagctttaatgtcacctgaagttcacagaataaggaacaggttatgagctatagcaatattcttgtcgctgttgcggttacaccggaaagtcagcaactgctggcaaaagcggtatctatcgccaggccagtaaagggacacatcagtttaattactctcgcttccgacccggaaatgtacaatcaattagctgcgccgatgcttgaagatttacgcagcgtgatgcatgaagaaacgcaaagctttcttgataagttaattcaggatgcggggtatcccgttgacaagacgtttattgcctacggtgagttaagcgaacatattctggaagtatgtcacaagcatcatttcgatttggtgatttgcggtaatcacaatcacagtttctttagccgagcatcctgcagcgcgaaaagagttattgccagtagtgaggtcgatgtgctgttagttccacttacgggagattaaccgctcttacgcaagctttggaaaggtagcaactttatcgcgctgctggctttccgcgcttcgcggaactatctgctttaggtcgctaatgaagcactcctgccagtggttaatatcgtttttcacgataacgtccagcatttctgcatgacgggaaatacgttccgccaggctcatagtcaatgcacgatccagcgcagctgcaacttcgtcacgatcgtaggggttaacaattaacgcgctcgttaactcgtttgccgctcccgcaaattggctaagaacaagaacgcccggattggctgggtcctgagcagcaacatactcttttgctaccaggttcatcccgtcacgcagtggcgtcactaagcccacgtcagagtagcggaatattttcatcagtaatttacggtcaaaatgctgattcaaataataaagcggcgtccagcctaattgcccgtatttaccattaattcgtccagcttcattttcgagctgatgacgaatatcctgataggcttgcacatcaccacggctcgttggtgcaatctgggtataacgaattttaccatgatgctgcggatatttttccagcaacgcttcataggcgagaaaacgctctggcaaacctttggaataatccagccgttcgacagaaaagatattttgtacgtttttcagttccgctttaagttgcgccagttttggcggcagtggcccggcagcctgtttggctatttctttcggttcaatgccgatcgggtagacttctgttcgaaatgctttgccccaggctgtatggctttttgcgctacgtgtcgtgacgcgggtcaggttagaaagacaatccaggaacgccagacgatcgttttctgtctggaaacccagcaaatcataatcacaaagctgttcaagcaaggtgtcatatgtcggcagcgcgttgaagatttccggtgtcgggaaaggaatatgcagaaagaaaccaatgcgattattcactccccgtttgcgtaattcatgcgcaaatggcaacaggtgataatcgtggatccagataatgtcatcgtcttgcaacagcggcagtaatttatctgccagcaacgcatttacgcgtagatagccgtcccaggcaggacgctgaaattgcaccagatcgagccgataatgaaaagcgggccagagaacggcattggagaattggttgtagtattcgtcaaggtcctgttcgctgaggttaaaagaggcccacgtaatgttaccttttttcaccttttttagcggctgatcctcattccctgtttcaccactccagccaaaccacagtccgcctgcggctttcagtgcccccagtatgccaacggcaaggccaccggcactggcggcgtgctcgtctggtggtgcaatccggttagatactacgactaaacgactcatagtcatcactcctgttatttttacttagatactacgactaaagctctcatagtcatcactcctgttattttctcttttttgttgtaatgcggtggttatcatttcaagccagctccagacatccggcacacccgccagtcgccaacttgcctgagttgcacctgtgccaatttttacactcattccgcccagtcggttaacgactgcgaagccagattcatcggttaaatcatcgcccagaaatacgggcgttcgcccgataaagggagcttcctgcataaaagctgcaattgcctcacctttactggtacctctcggtttgatctcgacaacacactttccctgctgtaacgccatttgtggccagatctgagtaatacgttgcgctaatgtcattaatgcgtcttcatgctgcggagcctgacgataatgcagcgcaaaagccatccctttcgcctccagctccgcgccgggatactgagcgatgactgtatgcagttgcacgctaatatcacgcgcaatcgcatccggcagatgaacgatatgtgttttaccattgatgtcacggcgctccgccccatgcacgcccgctaacgggaagcgataaggttttgccagtgcgtcaagctccaccatactgcgcccacttatcaatgccaatgcaccatcacttgcggttgccagtagctgtagtccttgcagaatattgtcaggcacgacgacctgatcgggatgcggtttgatttccgccagcgttccatcaagatcaaaaaaccaggcatatttcgcggatagttcaggggtttcggttaacggttctgtcacccggttctcctccttctcttttcttattgtgttgcgcagaacgcgctttacagacatgtaagtatagacagtgtgacgggggtcgccatttgcaacgaagaacagccaaccgttatggcggttggctatggtgggaaaaaacgctaaattgttgcagaaaaaagcatcagacagtgcgtttcgctttttgcttgtaacggtcgaagatcaccgctgccagcaggattaagccgcgaaccacgtactgcgcgaaaggagaaatattaagcaggttcatggcgttttccacggtgcctaaaattaagatacccgccaccacataactgatttttccgatgccacctttcagagaaacgccacctaaaacgcaggcggagataacaatcagctcataaccaatgctcgtcattggctgcccactggtcatacgactagccagaataattccggctatcgcacttaccaggccactgagaacaaagataataattttggtgcgaacaaccggtacacccgccagacgcgcggcctcttcgttcccgccaatcgccagggtgttacgaccaaaggtggttttattcagcagcaaaccaaagataatcagacacgcgacggtgagccagattggcgcaggcagaccgaaccagttggcgtaaccaagggcaaagaagctttcatcttcgataccgaccgctttaccgtcactaatgatgtacgccagacctcgaacaatctgcatcgttgccaatgtcgtgatcagagcatttattttcagtttggcgataacaaagccattgaccaggccacagagaacgcccagcaacaaccccgctgccacgccaatccacaggctttcagtcaggttaataaccaccgccgtggtgacacccgcacaggcaattacggaggcgacagaaaggtcaaagtcaccggaagcgaggcagaacaacatgccacaagccaccatcccgctcatggaaattgccaggcccaaccctttcatattaatgaaggtggcaaaatttgggacaaaaatggcacaggcgataaagagcaccgcaaacaccaccagcatgccgtactgatcccagatacgcccgaagctgaaactgctcttaggtgcgccagacccgcttgtagaaacagaagacatcatactctccttactcaggcaacagcctggctgactttaggcatcgcaaggctcagtgcctgacgctcatctgcctgctcgtgtaacaattcaccggcgatttcaccttcccgcatcaccacaatccggtcggcaacgccgaggacttcaggtaagtcgctggaggcaaacagcaccgccacgccctgcgccgccagcgcataaattacgttatatatttcgtgcttagcgccaacatcaatgccgcgcgtaggttcatccagcaaaatgaccttcatctcttcgcttaaccagcggcccagaatggctttttgctgatttccgccactgagattcatgatcagttgctccgcgcccggcgttttgatgttgaggctacgaatgtggtgatcggcattgttttcttcccaaccgttgttgattacacaaccgccgagcacatgtttacgtctggcactgatgttgatattgtcgcgaacggagtgcacgggaataatgccttccgctttgcgatcttccgggcagagcatcatgcctgcggcaatggcgtggctcggtttacgaatatcgatcggctgttggtcgatataaacctgaccggcggtgatttgcgtcccgccaaacatgcctttcattaattcgctacgccccgcccctaccagaccaaacagcccaacaatttcaccactgcgaaccgccagacttattggcgtacgcacgcctggtgctttcacagcatcaagacgtaggcgctcctcgccataactacgcggttgccagccgtagatatcgccaatgtcgcgcccgaccatcgcctgcaccagcgcgtcgtggtcaacctgctgcatatcggtaaaggttttgacataacgtccatctttaaagacagtaatggcatcgctgagggcaaatatttcttccatacggtgagaaacgtataagattacccgcccctcttttcgcagttcacgaataacgcggaaaagattgtcgatttcacgggcagagagggagctggttggctcatcaaaggcgataattttggcgttacgcgccagcgctttggcgatttcaaccatctgccactgaccaatggagagatatttcagcggcgtgtccgggtcaatatccataccaagatgtttaagttgtaaacccgcctcataattcagcaaactgcgattcacaatgccgcctttatgcggcagctggccgagatagatgttttccgcgacggtcatttccggcacgagatgcagttcctggtaaataatcgccacgcccgcgttaagtgctgcggtcgtgtcggaaaaggacatttcctgcccattaatcactacagaacccgtggttggcgcatagttgccgctgaggatttttaagagagtactttttcctgcgccattttcacccatcaacgcatgaacctgaccggcatagcagtcaaaactaatatccgtcagcgccttaacgccgggaaacgttttaccgatgccgcgaaaactgagatacggggtagactgttgcataacgtctccgtgaatcactggtcgttcacaccccctctgcatcatgcagaggggaatttttccggcaaattacttaccgcctaaaccttttttctccagttcttctttaaagttgtcacgcgtgatcagtaccacgtcggtaacttcggtaaattttggcggttcaacgtcttttgctacccagttgtaaagcatttcgctggatttatagccatgtacgtccgggcttggcagcagggaaccgtagaagccggttgcctgtgctttagacagttcgctcaccgcatccacaccgttaatgccaatgccgatgatatcggccgctttaaagccctgaccttccgtcgcgcgtacgccgcccagcacggtgctgtcgttcataccgacgatcagccaatgtttaacttccggatgttgaaccagcatactgttggcagcgtcaaatgcccccgggatgtcgttagatttggtaggtacctgataaatttgtttttccgggaatccggccgctttcagcgcatccatagatcccgtagtacggcggcgggcggtatccagttcgttggcggtaatcgccatcaccgcgctttctttgacatcccagccacgtttctgcatctctttatacagttcctggccctgacgttcgccaattttagtcgccgccatcatcaccagcggaacggtatccattggcttacctttggcgttaacaaactggtcatccacggcaatgactttcatatcgtagccacgcgctttcgcgacgatggcagagccgagtttggggtccggagtacaaataacgaaaccttttgcgccactggcagccaggctgtcgatcgcgttcaatgttttttcgccatccggcacggcaatcttaataacctcaaaccctaaatccttcccggctttatcggcaaacttccattcggtctggaaccacggctcttccggttgcttcaccagaaaaccgagcttcaggttctccgccatagcggattgactcataacggctgccagaccaatggctgccagggctttagtaaatttgtgcatggttctctccagctttagtgtcgttttgtgtagggcaaaaacgaatgacattcgttaaattaatcggaaaacaaagcattaccttttaactaaaagataagtgactgtgttgacatagttttagcgagaaattaattctccataggagagcaatatcacatcgcagaattacagtgagaacgtgcataaatttagcgggaaaagacataagggaaagccaatttgtcagacaaattgtcgaatgcacagcagattaatccataagattagcctggaaatccttgttgtctttggtacccatgcgggatgtcttctttttaaccagtcaataggccgcattacctggcgttgagtttttgaaatggtgtaataaccgcaactcaaagatgtggaaaatgcacgtcattcatttcgtcattaattatcactgtgctcattaattaacagaacacgtataatgagagccatctcgcaaaaatgaaaaaacgttttataaaatcatcacttcatcatgaattcaaattcattgattaatatcaacaagatacaaaaagcactatcattaaaattcattgcagttacattgatttcatcaatgaaatgtaaaaatatataaacttgatgatttaagcattttcttatacccgttcagacgttattcttatttcagatcatcgtcagaattgactccacgatcacatttcggaccggcagaaaggaattattctgcaaacagtaattatggtgttttgatttatcttgcacctctccacttctggatataaggatattaggtatggcaaccgctggaatgcttctcaaactcaactctcaaatgaaccgcgagttttacgcatccaatctctaccttcacctgagtaactggtgttctgaacagagtctgaacggcaccgccactttccttcgcgcccaggcacagagtaatgtgacccaaatgatgcgcatgtttaactttatgaagagtgtcggcgctacccccatcgttaaagccattgatgttcccggtgaaaaactgaactctctggaagaactgttccaaaaaacgatggaagaatacgagcaacgttctagtacgttggcacagttagccgatgaagcgaaagaactgaatgatgatagtaccgtcaatttcctgcgcgatctggaaaaagaacagcagcatgatggtctgttgctgcaaaccattcttgatgaagtgcgcagtgcgaaacttgcgggtatgtgccctgtgcagaccgaccaacatgttctgaatgtcgtgagtcaccagctgcattgatcatcatcggcgctaatgcattgcgccgatgaaggttttgagaaaccgctgcctcatctgtttgaagcagcggtttttttaatgggattcaccctgtggggtaaacttgagttcaataagcgcgatggctttttggattgcccgcatggtgaccgggtctgcggcggcgggatggttagtaaagtcgatattcttcagctgactggacattttttcacgaacttcaacgggcgcgattacatcgagaacatccagaatttgtttgataaccaactggcaagcaaccacatcagaaaccaattcctgatcggcattcagcggctgggacatcgtaaactcctgatagcattttgaaagccgttatagtagcgacttcacatcttcagcgatagtcacatccaccgtcatcaggacacaaaaaaacctgccggagcaggttttttgttatcggaacatattgcctggcggtacgtctttgaacgtcttgcaatagttattgaacatacttttcaggattttgcgcagtttcatcgcggcactccgaccatttgttatacaggtgttattgtctttgcgcttataatatgacaaccatcacaaaaatcaatctttatgtgatacaaatcacataaatacccctttaatgttataaaaatgataatcaaaaaacagcccccctatttctgacacctacagatggcaagaaatagcgcctgccaggcgtcttttccggccattgtcgcagcactgtaacgcgtaaaatagtgctttctcttactcttctggctggaccatgagacttctgattctgactcttagtttaataacgctggcggggtgtacggttactcgccaagcccatgtgagcgaagttgacgcggcaacaggtattgtacggttagtttatgaccaggcttttttgcagcatgcccataccgatcgttatgtcagtcgcgggatcgccgatcgcgcatgccagcaggaaggctatacccacgcggtcccctttggtcagccagtaggcaactgtagcctttttgcgggttccttatgtttgaatacggaattcactttgagttatcagtgccatcattccgccttccctgtctttctctaaatattttaatcagcgaggggatcttcgctgattaaagaaatagcggtaatgcgttttattcccattcgtatttttaataattgaagtttatattttaccttttgcaaataataaaataacaaattatagtgacgccacagcaacaaatataacctttgtggagcactatcatgctgaaaccagaaatgattgaaaaacttaatgagcagatgaacctggaactgtactctagtctgctttatcagcaaatgagcgcctggtgcagctatcataccttcgaaggtgctgccgcgttcctgcgccgtcacgcccaggaagagatgacgcatatgcagcgtctgtttgattacctgactgataccggcaatttaccgcgtattaataccgttgaatctccgtttgctgaatattccagtcttgatgaattattccaggaaacctataaacacgaacaattaatcacccagaaaattaacgaactggctcatgctgcaatgaccaatcaggactacccaacatttaatttcctgcaatggtatgtttctgagcagcatgaagaagagaaactgttcaaaagcattattgataaattaagcctggcaggcaaaagcggcgaaggtctgtattttatcgacaaagaactctctaccctcgacacacaaaactaatgctctccggcggcaggtttactgccgccgtttcaaatcagtgacggcaaatcttactctgatcggtgctaaaaccgtctttgctaggtataaatttgccttttgctgccagaaacgctaccagctctcccgctgtcatcccttctgcgctgcaggtgtgaaaacgtgcctgttcaccaaaacgcgctttaatcgcagcttccagactggcatgcgtatattgctcgccactttcaatcatcatatttaacacttcatgaccgtgaatagagtccatcgtccctcctcaaaaaaagcctagcgtagcgattgccgcttatgaagactttgcgccagcgcaggactgaatgctttttattgtacatttatatttacaccatatgtaacgtcggtttgacgaagcagccgttatgccttaacctgcgccgcagatatcactcataaagatcgtcaggacagaagaaagcgtgaaaaacagaaccctgggaagtgtttttatcgtggcgggaaccacaattggcgcaggcatgctggcaatgccgctggctgcggccggtgttggttttagcgttacgttaatcttgttgattgggctttgggcgttgatgtgctacacggcgctattactgctggaggtgtaccagcatgttccggcagataccggtctgggcacgctggcaaaacgctatctgggacgctacggtcaatggctgacgggcttcagtatgatgttcttaatgtatgctctgactgcggcatacatcagcggtgccggtgaattgttggcctccagcatcagcgactggacaggtatttctatgagcgcaaccgctggcgtgctgttgttcacttttgttgccggtggcgtggtttgtgtcggaactagtctggtcgatttatttaaccgttttctgttcagcgccaagattatttttctggtggtaatgctggtactactgctgccgcatattcacaaagtgaatcttttaaccctgccgttgcaacaggggctggctctgtctgcaatcccggtgatttttacgagctttggttttcacggtagcgtgccgagtattgtcagctatatggatggcaacattcgtaagctacgctgggtgtttataatcggtagtgcgatccccctggtggcatatattttctggcaggtggcgacgcttggcagcattgatagtacaacctttatgggattgctggctaatcatgctggattaaacgggctgttacaggcgttacgcgaaatggtggcctctccgcatgttgagctggcagtgcatttatttgctgatttagccctcgccacgagttttctcggcgttgcgttaggcttatttgattatctggctgatttatttcagcgtagtaataccgttggtggacggttgcaaactggtgcaattacgtttctgccgccgttggcgtttgcactgttttatccacgaggatttgtgatggcgctgggttacgccggtgtggcgctggcggtactggcattgattatccctagcctgttgacctggcaaagcagaaagcacaatcctcaggcgggttaccgggtcaaaggtggtcgtccggcgctggtggtggtgtttctctgtggtattgctgtgattggcgtgcaatttttgattgcggcagggttgttaccagaagtggggtgatcagatagcctcaaattccttattgggtgccagaattaacgctgacacccaatttggcctcttaatgcaggcagcactgcttaaatttcttaccactaccgcacgggcaaggatcgttacgccccggtttctcttctgctttgatcggttgctgaacagctttttcctgcggatgcgccatccagtacgcatgtagatcaagcgccgccagtcgaatggcatctacgctctcttcaaacgcttctgggctcatcttttctacccgctcgaagttttcctcagtaccgtgcagcgcaatcgcctccagcgctggttttaagctatcgggcaacgtactccagtcagaaagtgccacgccccgcatatagccaaagcaccactcctcaacaatcgtcagctcgctgccatcaacttctcgcaagccgaataacggctcaaactgctccgggaattcgttcagacgctctgcggtatcggccatatgttgaaaagccagattcataaagcgcgtcatctctttctcactcgcccagcgcggcacatagtcagccccaccccacacggcaaccagccactgttccggttcaatctcttgcggagaactcaacaccgccgtcaataaaccgtccagctccgccacatcaaggatggcgtggtcagtgttgtatttggtcagaatatcgtccagccattccaactcactttcgtttaacggtcccgttttcatacgcttttccttgtggatctcaactcgccagcacctatcttacatgccggtccgtatcagagatactttttgagtggctttgctggtgattaaaaattaaggagggtgtaacgacaagttgcaggcacaaaaaaaccacccgaaggtggtttcacgacactgcttattgctttgattttattcttatctttcccatggtacccggagcgggacttgaacccgcacagcgcgaacgccgagggattttaaatcccttgtgtctaccgattccaccatccgggctcgggaagaaagtggaggcgcgttccggagtcgaaccggactagacggatttgcaatccgctacataaccgctttgttaacgcgccaaattcttcaggcctttcagccagacatccgcttgacgccgatgtcttttaaactggagcgggaaacgagactcgaactcgcgaccccgaccttggcaaggtcgtgctctaccaactgagctattcccgcattcatcaagcaatcagttaatcacttgattttattatcgtctggcaatcagtgccgccgttcgatgcgttgcattctacttacctggcgcgatgagtcaacgatatttttcaccacttttgatcgtttgctgaaaattacgccgaaacgatcactgatcaagcaaatctgcacgcgcagcgctcaaatattgcaacatactccacagagtcagtaccgcagccacaaagaaaagtgcaataccggcgtactcaacccaaatgttcggacgccacagcagccatgccaacgccaccatctgggcagtggttttcactttcccaatccaggagacggccacgctactgcgtttacccaactccgccatccattcgcgtagcgcagaaataataatttcacgggcgatcatcgttgccgccggtaatgtcacccaccagctgtgataatgctcggttaccagcaccatggcgatagccacgagaactttatctgccacagggtcaaggaaagcaccaaaccgggtactctggttccagcggcgtgccagaaaaccatcgaaccagtcagtcaccgccgcgacgcagaaaatgagcgcggcggcaaacgggctccaggtgacaggcagataaaagaccaatacaaagaatgggataaggatgacacggaacagtgtaagcaacgtagggatattaaattgcataatgacgggtaactatctgttgtcagtaagattacccctatgttgctacagagacatcaatgtttcaagctccagaagatcttttctgccagaccttggctaatacccggcacttttgcaatttcctcgacgctggcgttacgtaaaccttgcaaaccgcccatatatttcaacaacatttgccgacgttttggcccgacgccttcaatggtttccagggaactggtatttttgaccttcgcccgttttttacggtgcccgccaatcgcgtgatcatgactttcatcgcgaatatgctggataacatgcagcgcgggactatctggcggcaaactaaatccctcaccttccggctcaaagaacagcgtttccagtccagccttacgatctgctcctttggcaacgccaagtagcagcggatgatttttatcccaactgacatccagttcggcgaagacatttttcgcctgcgcaagctggcctttgccgccgtcgataaggatcacatccgggatcttactgtcgtcaatggctttaccataacgccgacgcagcacctgattcatcgccgcataatcatcgcccggcgtgatgcctgtaatgttatagcgccgatactccgcacgcagcgggccgttagcatcaaacaccacacaggaagcgacggtttgttcgcccatggtatggctgatgtcaaagcactccatccgcttcacttccggcaatttcaacacgctggcaagcgcggtcagtcgctggtgaacggtagattgctggctaagtttgctggttaaggccgtcgccgcattggtgcgcgcgagtttcagataacgcgccctatcgccgcgaggtttggtttgaacattaatcttgcgtcccgccagttcactaagggaatcggcgagcagcgttttatcgctaagattaaaatcgagcaggatctcacccggtaaggtgcgcatctggctgccttgtaaatagaactggcctacgaaggtttctaccacctcgctcagttccgtaccgccaggcactttcgggaaatagctgcggctgccgagcactttgccctgacgaatgaacaatacgtggacacaagccatgcccgcatcgaacgccacaccaataacgtcgaggtcgtcgccggtattggaaacgaattgtttttcggtgacgcgtcgcaccgcctgaatttggtcgcgaatacgtgcagcttcttcaaactccagattctggctggcagtttccatacgactaatgagttgcgtaagcacctgatcatctttgccagacaaaaacaggcgcacatactcgacctgctgagcgtattcttcttcactcaccagtccttcaacgcacggtcccagacagcgccctatctggtattgcagacacggacggctgcgattgcgataaacactattttcgcactggcgaatggggaaaatcttttgcagtagcgccagtgtttcacgtacggcatagccattcgggaacgggccgaaatattcacctttggcatgcttcgcaccacgatgcatcgccagacgcgggtgggtatcaccactcaggaagataaaaggataacttttatcatcgcgtagcaaaacgttgtaacgcggctgatagagtttgatgtagttgtgttccagcaacagcgcttcggtttctgtgtgagtaaccgttacatcaatttgctggatctgggcgaccagcgcttcggttttgcggctagcgaggttgctacggaaatagctggaaagccgttttttcaggtctttcgctttgccgacatagataaccgtaccaccagcatcgtacatgcgataaacgcctggctggctggttacggtttttaaaaacgcttttgcgtcaaactgatcactcactgactacttaatgtctccgcattacacagaccatggcgaattgccaggtgagtcagctcaacatcgccatgaatgtttagtttactgaacatacgatagcggtagctgttcaccgttttcggactgagattgagctgttcactgatctcattgaccttctggcccttggtgatcatcagcataatctgcaattcacgttcagacaaactggcaaatgggctttctgttttttctggttcgatctggcttaacgccatttgttgagcgatgtcagaagcaatgtaacgctgcccactatagacagaacgaatcgcactcacgacttcctgcggagccgcgcctttgctgaggtagcccgcagcaccggcctgcatgactttcgctggtaaagggttttctgtatggacggtaagcatgatgattttgacatcagctgtggaacgcgcgattttacgcgtcgcctcaagaccgccaatgcccggcatactcatgtccattagcaccacgtcaacggcatttgtccggcaccacttaacggcgtcttcaccgcagcttgcctcaccgacgacttttataccctttatatcttccagaatgcgtcgtatccctgcgcgcaccagttcgtggtcatcaacaagtagaacgttgatcaaaggaatatctccagaaatagggataacgctactgatagttagtcattcgtatattagcggtttttattgcaactttgaaacgttaaaaatggtgggtattcgatttttctctcgtttttgtcaattcgattgtccacagttatggtcacgcccgtcaccaacggcttaccggatcgtttcacagtaagccctacgatgaaatgtgacaaaaattgactttattcagcaaaaatgaaaatcagcccgctgaatatgtaacattaattaacccgaacaatacgggcaaaaaacattcatgataaaaatatttattggtcattatattaacgtattttatagcactgccgatatcacgctcaaaaaacaaccactgctatttttagcaaagcttatggtatactccgccgccttaacatttttcaccgcaaattttcattgcaacatgacgaggaaaataaatgagtacgcctgatttttctactgccgagaataatcaagaactggcaaatgaagtctcctgcctgaaagcgatgctgacgctgatgctgcaggcgatgggacaagctgacgcgggccgcgtgatgttaaagatggaaaaacagcttgcgctgatcgaagacgaaacccaggctgcagtattttccaaaacggttaagcaaattaaacaagcctaccgtcagtaatataaaaccggctgatagcgtgcctttcagccggtttttgcatctggcacgcaggacagaaaagagatcaaattaagccagtagcggccgcgtaacaggcaacctgggtcttatttggtgcattaatttttttctgcatgtttttctggtggaaattgaccgtattctcagagatactcaaaatcatcgctatctctgcacttgttttcccttccgccgtccacctcagaatttctttttcgcgcttgctgaaattcatctctggcgtcatcactatttcatcatttaaacgcatcagagccatcagactttcgcgcaccagtaactgcatttttaattgcagttcatcactaagaatgggtatttcgcgcgcgctgcaacgggaaaaggacaaaaagcccagcgcccggtttggcagcattaaatactgagtgacaccgcggcgtaaaccatgtgcgcgcgcggcttcccataacggctgtgcttcgctgaataagtcatcattccacattaaatggccctgactaaagttttcagggttcagcaccggatcaattgcgagaaagttttttgcctgataataactaacccacgcctcagggtaattggtgtaaaaagccactttaggtcgagtgaatggtaccgggtggcggacacataagctatagtaatcgtactccagctgctgagcctgaagctcaatttcatggtagacctcttctgcggtctccatcctctgaaaacgcaacagcatcgtgcgacgccagctgaaaaaatccttatcctgcatagtaaaccgcaacgcccttgagagtgagtatcatttataatgataattcaaactatcacataaataagatttatatataatttatattattcaggcaatgaattacttttgcaagccatcgcattctcttatgttattaatgagttatgctgatttgttaagcagttttatcaggcttgaaatggcgtccagccccgacaggtgaatcgtcggggctgattttttcttattattgcagcagaaacttctcgaggaactggcgggtgcgaggctgctcggttccgtaacgtttatcatgttatcctaaggattatccgaaaaataatacctacgaacatcttccaggatactcctgcagcgaaatatttgttttaagctcactcacatatcgcaacatttactttactttaagacaattccaggcaaattatacaacactttacgggatagtaagtccgcctgaaaaatcgcgagagtggcgcattaggtgacccatgttgttccgtttagtcatgatgaaatattcaggtaaggggaattatcgttacgcattgagtgagggtatgccatgagtacgattattatggatttatgtagttacacccgactaggtttaaccgggtatctgttgagtagaggggttaaaaaaagagaaatcaacgacattgaaaccgttgatgaccttgccatagcttgtgatagtcagcgccctagtgtggtgtttattaatgaggactgtttcatccacgatgcttctaacagtcagcgtatcaagctcatcattaatcaacatcccaatacgttatttatcgtttttatggcaattgccaatgttcattttgatgaatatctattggtcagaaaaaatttattgatcagttctaaaagcattaaaccggaatctctcgacgatatccttggcgatattctgaaaaaagagacaacgataaccagctttttaaatatgccgacgttaagtttgagccgaaccgaaagcagtatgttgcgaatgtggatggcaggtcagggaaccattcaaatctctgaccaaatgaatatcaaagccaagaccgttagtagccataaaggtaatattaaacgtaagatcaaaacgcataataaacaggttatctaccatgtcgtccgactgacggataatgtgactaatggtatttttgtcaacatgcgctaacacattctgactggtggtttcccaccagtcaggctgaataagattactctgctttctccacaaagataccgtcctgatgccctgcttcattaaagaaccagatgccgagcgggtagtcttccaggctaaccaggtacattgtgccttcactaaactcctcaactgccagtaccacgccaggacgacgcggaccgccatccgttttgactgttacccgatcattcaccttcatcgttttcctcctgtggctttgtgccagtgtagaacaatttcgtttttctggcagcgccaggcgcgcgcgagtgctgattttctcgacggtctatacttaagagatgccaggcggacttaacgactggcggcaacaacagagtaacggttgcgaggaaagatgatgaaaaccgcaaaagagtacagcgataccgcaaaacgtgaggtcagcgtcgatgtcgatgccctgctggcggcgatcaatgaaattagcgaaagcgaagttcatcgcagccagaacgattctgaacacgttagcgtcgatggacgtgaatatcatacatggcgtgaattggcggatgccttcgaactggatattcatgacttcagcgtctctgaagtgaatcgttgaatgcacaataaaaaaatcccgaccctgagggggtcgggatgaaacttgcttaagcaagaagcacttaaaaaattcgttacaccaggaaatctgatgtgttcatcaccttatccgcaatttttttcgctgacaagaaaatattcgccatatgaatgattaacgctacttatgaatagaaatgtgacgcacgtcaccccttggtggctctggcgtcagcgggatcgctcccgaaaaaatcatctttgataatttgtgcggttttgagaatcatcctggtaagaggagtactgcgcgactatgtttagtattcaacaaccactactggtttttagcgatcttgatggcaccctgctggacagtcatagttatgactggcaaccggcagccccctggctcacccgtttacgcgaagcaaatgttcccgtcattctctgtagcagtaaaacaagtgcggaaatgctgtacttgcaaaaaacgttggggctacaaggtttaccgctgattgccgaaaatggcgcagtgatccagcttgctgagcaatggcaggagatagacggttttccacgcatcatcagtggtattagccatggcgaaatcagcctggttttaaatacgctacgcgagaaagaacattttaaattcacgacttttgatgatgtcgacgatgcaaccatcgccgaatggacgggattaagccgtagccaggcggcgctgacgcagcttcatgaggcgagcgtaacgctaatctggcgcgacagtgacgagcgtatggcacaatttaccgctcgtctgaacgaactgggcttacagtttatgcagggtgcgcgcttctggcacgtactggatgcttctgccggaaaagatcaggctgccaactggattatcgcgacctatcaacaattgagtggcaaacgcccaaccacacttggcctgggcgatgggccaaacgatgcgcccttactggaggtaatggattacgcggtgattgtgaaagggctaaatcgtgaaggggtgcatctgcatgatgaggatccggcccgcgtctggcgaacgcagcgtgaaggaccggaaggatggcgtgaagggctggaccattttttctccgcccgttaagcgttatcgctcgcgaatacccgattacgcccagcctgtttagcgagataaagccgacggtcggccagactctggagttgttcaaaatcataatcaccggtttcctcgctgctgcttacccccaggctggcactgatgcgtatcgtcgtactcttggcgatcaacatctctttttcatttaatttcagtcgaatacgttctgcgacctccgcagcctccgtcagactcgcgcctggcagaatcacacaaaactcctcaccaccgacccgcccggcaacgtcctgcgcacgcaaggaactgctaattaatccggcagcatgagaaagaacacggtcgcccgcctgatgaccaaagcggtcattaatcgctttaaaatggtcaagatcgacctgaatgacagaaaaaggatgttggtgcgtctgacacaatttagcgagcggacgggctttttcgaacagtgcgccacggttatataaacgcgttaaggtgtcgtgccacgcctgccactgcaagctgctttgcagaacatacatgttgctaaccatccggcgaatcacataccaggagatgagtaacatggtggtaaagagcgcccacagcagggttaatgcaatgctgatactgccgaaatcgccgcgcacgccttcgcttaacgtatggacacgcaccagcacaccgtcgaaatggtccagacgttcccagctaacatagcgactgtccatacgaatgccgccccgcgtgtcatgttccattgcctgcgccagcaaggccagttcacgaggatcaaaaatattccctgttggatggtcaggattggaagaggtcaaaaatctcagcttactgtcatagagctgatactcaccatcgaggtttttatcgatggcgtttcttaaaaattgctgcatagtacgcacgggaatactcatccccagcacgccataccagtagttattactgtctaccggaacactgacggtaacctgcggttcagtattgctggcgtgttccggttggctagtgaaccagcgtaccgcgcggtgacgattttctcgttgactatggccaataaaccagggttgggtgacatagccgtaataacgcgttggaacattgcgcgtaaacaaggtcggctgcgtgctaacgtaaaatccggcacggctgacatacatcgcctgttcaaccatgctgctggagttgtgcgctagtcgcagcaagtaaccaacttccagtgcagcggtaatttcattgtcgaggctttcattttcgcgagacaggagattcccctcgctgactaatgcatcgctcacaccattaactggcagagtgcgtcgtcggttgagttcgattttccaggcgtgctcgtcgcgatgctgttcgaactcggttacagcatcacgcagagaggtgaaatccagtggcgctacgagagcttcgcgcatgccattacgtaaaaagatcagtttgtcgacgttatactgcaaatgcttatcgagcgcgttggcaacgttttccagatgattacgctggctggagatataggcatcttccagcaccaccacttcacgccaggtgagcaaggtggaaaaaagcaataccacgataaagcagagattaacgacatgaccaggccccaggcggcgtgcgagttttttcaaccagctctggttttccatttttgtctcgtgctgcaccctgacgactcccaacctgcttttttatgattctggcataacctggcgatagcgtaccgcaaaacagcgataattttataatggtggcatgataagacgcgactatcattcattgcaggcattagcacaccaggccggatgtgatccggcctgatgttaatgataccctttcacacttcttccgcagaacgactcccctcccccggaacaagctcggtttcatgaaaagcttcccgcttgaccccgtaaccgtcataccaacgacactcaaccataccgctggagtatccagtgacaatcatccgcgggccgccctctttaaccgtaacttcctcactaaccataaagctcatactcgcctccttttttcgagtgaaacttgttcaccttagttgaagatggcgaattttgcataatagccagtgcgagtattaatgtgcctgaccgcgcattttctctacggctttcactcccagcaccacgatgccgccgatgataaatccaagaatcagatttaaaacagtcggtaatatcatcgccactactgcactttgctgcccggcgaaatgttcaatggcgtgatgcagcggcgcaattccatgtaccacaatcccaccgccgacgaggaacatcgccagcgtgccgacaatgcttaacgctttcatcagccagggcgcgataatcaataaccctttacctaatgcctgcatcagcgcgctggatttttccgccagccaataccccaggtcatcaatcttaacgataacccctaccagaccgtagacgcccacggtcactaccagcgcgatgccactaagcaccagcacctgattaagcaacggcgcttcggccacaatccccagcgtgatggcgacgatttccgcagacaatataaaatcggtacgaatcgccccttttattttgtccttttcaaacttcagcggatcctgcgccgccagcttctccagacgctgctggctctgcgccggatcttctttatgtttacgcgcctccagcatatgcagcactttctctactccttcaaagcagagaaacgcgccaccaatcatcaacagaggcgtaatcgcccacgggataaacgcactgatgatcagcgccagcggcaccagaatcactttattaatcaggcttcctttcgccacgccccagaccacgggaagttcccggttggcccgcacgccactaacttgttgcgcattgaggcttaagtcatcccctaatacaccggcggttttcttcgccgccagtttgcccatcacggagatatcgtccagtagtgtggcgatatcatcgagcaacgtcagtaaactactcccggccaaaagcattccctctcatttttattgttgaagggtgtaagtatgaagcaaaaacggcagctctgatacttgcttcacaggtcaacatttttttaacaatcaagtgcaattatatctctcgccagcagaatgattttcacgtttactatgaaccacctttttatttccaccgtgagggattatgcgtttccgccagttgttaccgctttttggcgcgctgtttgcgttgtatatcatttggggcagtacctattttgtcattcggattggcgtggaaagctggcctccgttaatgatggcgggcgttcgattcctggcagccggtattttattgctggcatttttgctactgcgcggacacaaactccccccgctacgtccgctgctcaatgccgcgctgattggcctgttattgctggctgtcggtaatggcatggtgacggttgccgaacatcaaaatgttccttccggcatcgccgccgtagtggttgcaaccgtgcccctctttaccctgtgcttcagccgcctgtttggcattaaaacgcgcaaactggaatgggtgggtattgccattgggcttgccggaatcatcatgctcaatagcggtggaaatttaagcggcaatccgtggggcgcgattctgattttaatcggcagcattagctgggcgtttggcagtgtttatggcagccgcattaccttacctgtagggatgatggcgggtgcgattgagatgctggcggcaggcgtggtgttaatgatcgcgagcatgattgcgggtgaaaaactgacggcgctcccttcccttagtggcttccttgcggtcggctatctggcgctgtttggtagcattatcgccatcaacgcttatatgtatttaatccgtaatgtcagtccggctctcgccaccagctacgcttacgttaacccggtggtcgcggtcttgctgggtacgggactgggtggagaaacactgagcaagattgaatggctggcgctcggcgtaattgtcttcgcggtggtactggtcacgttgggaaaatatctcttcccggcaaaacccgtagttgcgccagttattcaggacgcaagtagcgagtaatcaagcgagtaaatgaatcccctgcgtgtcgatctgcgcgctggcaccttcgccgcagatccactcttccagacgctcggtaagcgcttcatccgtcagcttctcgcgcccacgtaacgcgcactcccagacaatcaatacgcgccagccgagttcctgcaagcgactgatatcgcggcgatcgcgctcaacatttttacctatcttctccagccagaactcggttcgagtcgcaggcactttaaacagatagcagtgatgatgatgccagaagcagccatgggtaaatatcacgcagcgatattcatcaacgacaaaatccggacgtccgggcagactggcgtcctgaacgcgaaatgccaggccctgcccggttaacagactggcgaggcgcttctctatcgccgtatcacgcgtggcaatcgcgcgcatatttttgctgcgagtggccttatcgtgaacgtcggccatgttgtgcctcttgctgacgcttagttatcgactacgtcggccatgttgtgcctcttgctgacgcaacgccaccgcctgtttgatttttggctcaagcagttttgccaccgcggcaaagaccggcacgaccacgctgttaccgaactggcgataggcctgagtgtcgctaaccggaatacggaatttcgcttctcccggcgcttcaaaacccattaagcgcgcgcattcccgaggcgttaaccgacgtggacgatgttgctgattcagcggatcgtcaaagtctttctcacccgtggccatatcccagccgcgatcgattaaaatttccgcgccatctttgtaataacgcgcagacagcgtacgcgtgacgctttgcggattgttcggataaaccattccataaccgaagccgttaccgcgcgcctgatgttttttcgcatatcgatagaggtacttccacagcaccggcgtcaggatatatttcgcctcgaccatcgggtccaacagctgcgccagcgtcactcgctgcgcagggaaacattcgctgatatcacgcagggtaaaatcggctttcagattcagatcgcgacgaaaacccaccagcacgatgcgttcacggtgctgcggcagaaaatgtttgccgtcgatgattttcggatcgtctggcccattatcttctgcatcagccacgtcatagcccagttcgtccagcgtctgcatgatgatgcggaacgttttaccctggtcgtgacttttcaggtttttgacgttttcgagcacaaacatcgccggacgacgcgcgtcgataatgcgtaccacatcaaaaaacagcgtgccctgggtatcgcaggcaaaaccgtgcgcccgcccgaggctgttctttttgcttacgccagccaggctaaatggctgacaagggaaaccggccagtaaaacatcgtgttcaggaatgtgttgacgaatatgttccgccgccgcctcatcactcacgccttctttatggctgagggtgatgtcgcggatatcttcattaaaatgatgcgtcgccggatcgcaataatggttggctttataagtgcgtaccgcatgtttgttccattcgctggtaaacacgcactgtccgccaatgctttcaaaaccgcgacggatgccgccaattccggcgaatagatcgataaagcgaaacgcataatgcggatgatgtgccggtggtttgggtaataacgtttgcagatgggcgaactctttctcacttaaacggtgccatgcgctgtcattcgccagcgcacgttttaaaattgccgcgctccagtgattctcacctacaccattaagctgcgccaccaacgttttaacatcataaatttgcagcagtttctccagcattgcctgtgcggcattcccggtgctgtaactatcggttacacttatattttcctgcatagatttcaccggccatctgagatggccgacaggttaacataattacagccatttagggccacgcgctcagccagcggaactaaacgcatctatcaccttgtgatcgacaccttcattctcccccgccagttcggcactgagcttcgccataaactcgactaaaaaatgcgcgttgtgctgcgccagctgcttgcctcttgcggtttgcatggtttgcggtagcttcagcaacttagtctggaaatgatccagcgcgtagcgtttatcatcaagcgggcgatgctgtgcgaacggatcttcaccatcaaacagcgccacgcccaatgccccactaacggcaaacacgcgcgccaggccaatcgcccccagggcttccagccgatccgcatcctggacaattttagcttccgttgttaagggggcgatttgcgcgctgaaactgtgagcggcaatggcatgacaaacggcctcgattttctccgccggaaattgctcgaactcttcacggagcaggcgacgcgtctcttctgccgccaggatactagaacgctgcctttgcggatgatttttcgccaggctcacaatatcgtgaaaataacaggcggttaaaatcaccagcatatcgacatcgtcatctgccgccagcttctgtgccgtagcccagacgcggcgaaaatgacacacgtcatgggccgcgtcctggtgctgatgatggtttttcaaccagttttcgaactgtgcctgccagtgttgtaagtccatacgcgctccgttgccaaagagtcgccaccttagcagtttttattcatagcgtctgctacgtgcgggacgaggtcgggtgtaccaggcaatgctgcctaacaatgccccgaccagagccataaataaaaatccgaccagtgcccctaaccactttcccgcggtagagcctaaatcgctttcaaatccgctcacgggggcatcgggaatccggctcatcacccagatgtaacgcgccattgcccagacgaaatagccacaccatgtatagaaagcccacaaagccagtttgccgccagggctgcgagagagtctctcttccatctttgtgctaccgtattccattttgagataacccggaaaattcagacttagtactattatgtgataaaagtcacatttttccacattggatgagccagtcaagactcaatcattttttgaacaaatagataaattttgcgcaacggcagtgaatacaggaaaaatcgttttgagcgattttatttatctttgatatcggctttattaattcatttaatcaatatattagcactgattacaattatacctttttattattctgtgtcatgatgcttccgttattagccttttatcgtcttgtttatattttttgggccggcatgatgccggcttttttttatgccttcattaatgtgcgcctgatcacaccagccgtttggcgcaacaatcattgataccccctatgtttccgctcaactcataacatattgatatacatttataattttcatgaatatttatatttagaattcataattatgaattatattaaatagattagaaacattttgatatcttttaaatacatttgttacatgtaatccttaaaataaaatgaacttcatagaatagtatccaaatgtgcttttttttggataacggcacttattgatatattcatgaagattataatcacaagggaatacataatgaaaagaaaagttctggcaatgctggtcccggcgttattagttgctggcgcagcaaatgcggctgaagtctataataaagatggtaataaactggatttgtacggaaaagtagtgggtctgcactacttctctgatgattctggcagcgatggcgacatgtcatatgcccgtatcggtttcaaaggtgaaactcagatcgctgatcaattcactggttatggtcagtgggaatttaacattggcgcaaacggtcctgaaagcgacaagggtaataccgcaacgcgtctggcatttgcaggtttaggctttggtcagaatggtactttcgactatggtcgtaactacggtgtcgtatatgacgtagaagcatggaccgatatgctgccagaatttggtggcgatacctatgctggcgctgacaacttcatgaacggtcgtgctaatggtgttgcaacctaccgtaacaatggcttctttggttaggtcgatggcttgaactttgctttgcaatatcagggtaataatgaaagtggtggaccattcgggcaggaaggttccggtagtggtgatggccgtagcctttccaaagaaaatggtgatggtttcggtatgtcaacatcctacgacttcgacttcggtttaagtctgggtgctgcatatcaaactctgatcgttcagatcgtcaggttggagttggtttaaatgatcgtaaccatagcaacagaaatgctggtggtgaaaccgctgaagcatggactgttggtgcaaaatatgatgctaataatgtgtatttagcagctatgtacgctgaaactcgcaatatgaccccatatggtggtggcgagtttgataatggtgaatcaagatcagccatcgctaacaaaacccaaaactttgaagttgttgctcagtatcagttcgactttggcctgcgcccgtccatcgcttacctgcaatctaaaggtaaggatttaggcggttgggctcatgacggcaacggcgacccacgttacaccaataaagatctggttaaatacgttgatattggtgcgacctactacttcaacaaaaacatgtccacctatgttgattacaaaatcaacctgctggacaacgacgatgacttctacgaagcaaacggcatcgctaccgatgatatcgttgctgtgggcttagtctaccagttctaatcagtcaactcgctgcggcgtgttactgtaaaactgaacactagcctgagttcgtccctcatcgaactcaggcttttttattggcatttcatctccatctgcggcacacgcaattgccgaagcatatcgatacagcaccttaccctgcccctcctggcacaataacatcaaccagctactcttcaagctaacacccaaatgcatttctttatgaattaatccgtaacaaacacgcttcccatatagaaatatttgcaaaaatagtgcatgaaataagctttttctctaccaatccgggatataaatattcatcagcaccacaatattccacagcactaaatctctccccgccaccccgtacctctgataatggtctaaaatcattgaagccacttgcgacgacgttgctcaataaggaaaatttggcgtgaataatattcaacaccagtgcagcatcatcattacatacttacagccgccgactaccgctttcgatatattgactcaattttccagcctggttaaaaatagcgaccagctcagtcgcaaatatagtgactaccctaactaagcaacaataaggaatacactatgactgttcaaacaagtaaaaatccgcaggtcgatattgctgaagataatgcattcttccctagtgaatatagccttagccaatataccagtcctgtctctgatcttgatggcgtggactatccaaaaccttatcgcggtaaacataaaattctggtgatcgccgcggacgaacgttatttgccgaccgataacggaaaactgttcagcaccggtaaccatccgattgaaacgttgctgccgttgtatcatctccatgctgcaggtttcgaattcgaagtggcgaccatttccggtctgatgaccaagtttgaatactgggctatgccgcacaaagatgaaaaagtaatgccattctttgagcagcataaaagcttgttccgcaatccgaagaaactcgcggatgttgttgccagcctcaacgctgatagcgaatatgcagcaatctttgttcctggtggtcatggcgcacttattggtttacctgaaagccaggacgtggctgccgctttacagtgggcaatcaaaaatgaccgttttgttatctccctttgccacggcccggcggcttttctggcgcttcgccacggcgataacccactgaatggttattccatttgcgcattcccagacgccgcagacaaacaaacgccagagattggctatatgccgggtcatctcacctggtacttcggcgaagaactgaagaaaatgggcatgaatatcattaatgacgacatcaccgggcgagtacataaggaccgtaaacttctcaccggcgacagtccttttgcagcgaatgcgttgggtaaactggcggcgcaggaaatgctggcagcttacgcgggttaatccctgttacgtttgaatgtaagcgcataatcaatcgcggccgcgttagtactcacgacgtggctgcgttttttcacggttaatttatggcgtactgaagccctatgttaatttctttgcggtaacgtaatccggaacacattatgcttattgagatagtgatacgtagcacttcccccatgcaattcggcaatcgctttgactaaagaaaggcctagtccctgacctacggaatgacggctattatctccccgccaaaatctacggaagagtttttcaggctcattaattttcgttccagggctggcgatatcaatattaagatagctgttggtatcaagaaaactggttatatgaatacggcttttttctgggctatatctaatggcattaacaataagattgcttaacattcgttgtagtaaaattttatccgcaaagatttgctgattgcactcgaccttaaagcaaatctctttctcgtcactaaggtattcaagatagtccaacaaattttcgacttccttattgagagaaaggctgtccagtttcaccaaaacattgtttttatctgccctggcaagaaacagtatgttctctgttaaccggctaatattttccagctcttcaatgtttccggcaattgttttttgatattcagcgatacttctggtttgactgagcgtaacctgattctgacccagtaatgcattaattggcgttctaagttcatgagcgagatcgtcagcaaactgacttagacgctcaaaatctttgactaaagcatgatgcattttattcaacgcctgcccaagaggttttagttctctcggtaatgcgctaacctcaacaggctctcggctatcgttataattcagcgcttccgttacaccactcaactttttgatctctcgtaatcccgttctgattaacagcggacttaatacactgcaaagtacaatggcgacaatgcaaattataatgctattaattttatactgttcaagcatgttatgtctggcactagccaatttagccacagtaaccgttaaacttgggctaacttcatcaatattaattcgtaaagcatctatctctgtatcattaataatgcttctgtaaatgccagctgcgctgattgtctcactagcaggtatgttatttaacatgccatcactgacatttgtccggttaacaattttattgatgctatcaccatgaataatcaagatatcctgactaacatccatcatccggttaaagtacacaggtaacgtatctggatttaccccatcaattaacaactgcttgatctgcgctgtccggttaatgagtgttgtatcatcgcgccatttcaactcacttgccaggccattatagagagtccagacaattccggcgccagcaacagacagtagcaatataaaaagcaaggttaaacggacggttatagatagtcttttcattatttttttaccgctacgaaactatagcccatcccccggattgtggcaattagcttttcaggaaaaggatcatcaacttttgcgcggagcctgcgaatggcgacgtccaccgtattggtatcactatcaaagttgattccccaaatttcactcgcaataaccgttctgggtataatttcgccagctctggaggccagtagccaaagtaactgaaactccttgcgcgtcagtgtaatactgatattgtccctgctcacactatgactaacagagtccattcttaagccgctgatttctaatgtactattcaaagcgtgatgttgccttaattgtgcccgaacccttgccagcaactcagaaaaactaaaaggttttaccagataatcatttgccccactgtccagccctctgactctgtcatcgacagaatcccttgcagtaaggcaaataacaggggtttgctttgctgttcttaacgtttgtaagatctgccagccatccatacccggaagcataatatccagaatgatcaatgcataatcatccttcagcgcaagataaagcccatctctgccatcagaaacggcatcgatgacataacccgcttcggaaagcccctgcgttacccattcctgggtcctttgattatcttcaataagtagaatcttcatgaaaataatatgccataaatcatatgttatagaaacagcctggttcattacaaaattgtaatgctgctgtaaggttaccctggacgctttttcgctatcctcaaaactcattcacatgacaaggatataaacatgttaaagcgttatttagtactcagcgtagcaacggcagcatttagtttaccttctttggttaatgccgcacaacaaaacattcttagcgtgcacattttgaaccagcaaacaggaaaacccgctgctgacgtgacagtcactcttgaaaagaaggcggataacggctggttacaacttaataccgccaaaacagataaggatggacgaattaaggcactgtggcccgagcaaactgcaactacgggcgattaccgtgtcgtatttaaaaccggggactatttcaagaaacaaaatcttgaaagtttcttccctgagatccccgttgaatttcatattaataaagtgaacgagcattatcatgtgcctttattacttagccaatatgggtatagtacctatcgtggcagttaatgcataaatatgtaaaagcagatctctgctactgttagggaggacactccctgacagattaacagtaaacggctcttgctggctaacgacaaaaaagtgtgatggcttatgaaaaagaatcaatttttaaaagaaagtgatgttacggccgagagcgtattctttatgaagcgtcggcaggtgttaaaagcactgggcatcagtgcaactgcactttctttgcctcacgctgcgcatgccgatctgcttagctggtttaaagggaacgatcgcccgcccgcccccgccggaaaagcgctggagttcagcaagcctgccgcctggcaaaataacctgccactgacgccagcagataaagtttccggttataataacttctatgaattcgggctggataaagccgatcccgccgctaatgctggtagcctgaaaaccgatccatggacactgaaaatcagcggcgaagtggcaaaaccattgaccctcgatcatgatgacttaacccgtcgcttcccgctggaagagcgtatttatcgtatgcgctgcgtggaagcgtggagcatggtggtgccgtggattggttttccgctgcacaaattgctggcgcttgccgaacctaccagcaatgcgaagtatgtcgctttcgaaacaatttatgcaccggaacagatgccaggccagcaggaccgctttatcggcggtgggctgaaatatccttatgtcgaaggattgcgtctcgacgaagcaatgcatccgctcacactgatgaccgtaggtgtttatggcaaggcgttaccgccacaaaatggcgcgccggtgcgactgattgtgccgtggaaatatggctttaaagggattaaaagcatagtcagtattaagctgacccgcgagcgtccgccaaccacctggaatctggcagcgcctgacgaatacggtttttacgccaacgttaatccgtatgttgatcacccgcgctggagtcaggctaccgaacgatttattggtagtggcggcatcctcgatgtacagcgccagccaacgctactgtttaatggttacgccgcccaggtggcaagcctgtatcgtggcctggatttgcgggagaatttctaaatgcgtctgacagcaaaacaggtgacatggctgaaagtttgcctgcatcttgccggattgttgccgtttctctggctggtctgggcgatcaatcacggtggactgggtgccgatccggtgaaagatattcagcattttactggtcgcactgcactgaaatttttgctggcgaccttgttaatcacccctctggcacgctacgcaaaacagccgttattgatacgcactcgccgcctgttaggattatggtgctttgcctgggcgacactgcatttaacaagttacgcattgctggagctgggcgtgaataatctggcgttattaggtaaggagttaattacccggccttatttaacgttaggtattatcagctgggtaattttgcttgctttagcgttcactagtacccaggcgatgcagcgaaaactcggcaagcactggcaacagttgcataatttcgtctatcttgtcgcgattctggccccaatacattatctgtggtccgtgaagattattagtccgcagccgctcatctacgctgggctggctgtactgcttttagccttacggtataagaagttgcgttccctttttaaccggttacgcaagcaggttcacaacaaattatctgtataacttcatattgccgacaaagtacgcgttatccctgccggatgtggcgcgagcgccctatccggcatacacagatcgcatcaggttatgtttcgtttgtcatcaacctcaaatcaccaaaataatttattttatttcaataagatagataagtagaactgagaaagccatgctctcgtttcctaagagttgttgcattttgctatatgttacaatataacattacacatcatatacattaactctggaggaaactgttttggcgattcgtctttacaaactggctgttgctttaggtgtctttattgttagcgctcctgcctttagccatggtcatcacagtcacggcaaacccttaacagaggtcgaacaaaaagctgctaatggtgtttttgatgatgccaatgtacaaaaccgaacgctcagtgactgggatggagtctggcaatccgtttatcctttactgcaaagtggcaaacttgaccccgtctttcagaagaaagcggatgcagataaaactaaaacatttgctgaaattaaagattattatcacaaaggttatgcaacagatatcgagatgattggcattgaggacggcattgttgaattccatagaaataatgaaacaacaagctgtaaatatgattacgatggatacaaaatactcacctataaaagtggcaagaaaggcgttcgttacttattcgaatgtaaagatcctgaaagcaaagcccctaaatatatacaatttagcgatcatataattgcaccacgaaaaagttctcattttcacatttttatgggtaatgatagtcagcaatctttattaaatgaaatggaaaactggccaacgtattatccatatcagttgagtagcgaagaagtggtcgaggaaatgatgtctcattgagtattctcatgataacgcctcgatgccgctttagtaagttatcataactgccactggtccatccacaaacgccactgaacgcaagctagctacagacacgctcatcactatgacgtgtctgtatattaataagctaacccgcattgagttaaccaataacggattccatacacaatacggccaacagagaaagatacctgtgctcacgccattgcttatattggctggttacaatatgcactatcaattttttaaataacaaattattaaaaccacatctgtataaggaatttttaaggttcgtgggatagcttgactgtgaaaatcacaggagctacaaaaatgaaccgattcagtaaaactcaaatttatttacattggataacgctgcttttcgttgcaataacctatgccgcgatggaactccgtggctggtttcctaaaggtagtagtacttatctgctgatgcgagaaacacattacaatgcgggtatattcgtttgggtgttaatgtttagtcgcctgattataaaacaccgttatagtgatccttctattgtgccaccgccacctgcctggcaaatgaaagcggctagcctaatgcacatcatgctttatataaccttccttgcacttcctctgctggggattgctttgatggcttacagtggaaaaagctggagtttccttggtttcaatgtgtctccctttgttaccccaaacagcgaaattaaagcactgataaaaaatattcacgaaacctgggcaaatataggctactttttaatcgcagctcacgctggcgcagcactctttcatcactacattcagaaagataatactctgttacgaatgatgcctcgccgcaaataagtcgatccccttacaaggaaatgtgaaccatggacatcaacgcgtcataaatgtttacgcaagtgcacaatgcaccctttccactatcaacaaggaggagcagaaactgtgtaaatcgtacaatggtaagacttatcaaaaatacaggttaattttggtatttaaaccttttttacttgttagtatgatacaaaggctttcaaaaaagctgcgaaattcaacaactcttggaaattatggactttgtcccgcggctttaatctgacggccgcgttccttttttgactcaattattgaacccttctctacgcaacttcagttcccaccaccaactttgcggcagtttcataggatgaatgtctaaaagaataatggtgagcgataagaaaacgactgaataactgcacattttcgctcgaaagcttcctgtcagatccatagcgaatcaagtgctgaatgtcacagtatcgaacagaaaacagtgacgatctaacccttcaagaatattctacgattgttctgtttaggaaaagcaaggcgggaagtcgggagataagtcattgataaagtggcggagagagggggatttgaacccccggtagagttgcccctactccggttttcgagaccggtccgttcagccgctccggcatctctccgttcagatggttgccatgatgccaggaaatttggcattttaacagtccctgtccgtgcaattttgttcaagtgacgagtttgcgagcaaaacgatgattaagtggccctggaaagtacaagaaagtgcacatcaaactgcccttccctggcaggaagcactaagcatcccccttttaacgtgtctgacggaacaggaacaaagcaaattagtcactcttgccgaacgttttttacagcaaaagcggcttgttcctttacagggctttgaactggatagtttaagaagctgccggatagcacttctattttgcctacccgttctggagttaggactggaatggctggatggttttcatgaagtcttaatttatcctgcgccatttgtggtcgatgatgaatgggaagacgatatcggtctggtgcataaccaacgtattgttcagagtggtcagagctggcagcaagggcctatcgttttgaactggttggatatacaagattcttttgatgcttctggttttaacctgattattcatgaagtcgctcataagctggacacccgtaacggcgatcgcgccagcggagttccctttattccgttgcgtgaggttgctggctgggaacacgatcttcatgctgcaatgaacaacattcaggaagaaatcgaattggttggcgagaatgcggcgagcattgatgcttatgcagccagcgatcctgctgaatgttttgccgtactttctgaatatttctttagcgccccagaactttttgctcctcgtttccctagtttgtggcaacgtttctgccaattttatcaacaagatcctttgcagagactgcatcacgctaatgatacagacagctttagcgcgacgaatgttcattaattaacaactttgcagattaattaaccaattgaaatgacttatgaaatttagtgttgacagacaaggtaccgctaagtaatattcgccccgttcacacgattcctctgtagttcagtcggtagaacggcggactgttaatccgtatgtcactggttcgagtccagtcagaggagccaaattctaaaaattcgcttttttagcgcaatgtcactgaccttagttgaacattgttttttaacggatagcgggtttttaacatcttaagcgccctcgacctttatggttgagggcgttttgctatgaacgccatcaccattttcccctcgattataaaacttgagttattcagtagtctcccctcttgcaactcacacccaaaactgcctaacgaaaagttattaattttcaatcatattgctatcagtatttacattttttcgctgtgctagaaagggcgcatttatgttagctcgtagtgggaaggtaagcatggctacgaagaagagaagtggagaagaaataaatgaccgacaaatattatgcgggatgggaattaaactacgccgcttaactgcgggtatctgtctgataactcaacttgcgttccctatggctgcggcagcacaaggtgtggtaaacgccgcaacccaacaaccagttcctgcacaaattgccattgcaaatgccaatacggtgccctacacccttggagcgttggaaagcgcccaaagcgttgccgaacgtttcggtattagcgtggctgagttacgcaaactcaaccagtttcgtacgtttgctcgaggttttgataatgtccgccagggtgatgaactggatgtcccggcacaagttagtgaaaaaaaattaaccccgccgccgggtaatagcagtgacaacctcgagcaacagatagccagtactagtcagcaaatcgggtctctgctcgccgaagatatgaacagcgagcaagcggcaaatatggcgcgtggatgggcctcttctcaggctagtggcgcaatgacagactggttaagccgcttcggtaccgcaagaatcacgctgggcgtggatgaagattttagcctgaagaactcccagttcgattttctccatccgtggtatgaaacgcctgataatctctttttcagtcagcatactctccatcgtactgacgagcgtacgcagattaacaacggcttaggttggcgtcatttcactcccacatggatgagcggcatcaacttctttttcgaccacgatcttagccgttaccactcccgcgccggcattggcgcggagtactggcgcgactatctaaaattaagcagtaacggctatttgcgactgaccaactggcgcagcgcacctgaactggacaacgattatgaagcacgcccggccaatggctgggatgtacgcgcagaaagctggctacccgcctggccgcaccttggcggtaaactggtctatgaacagtattatggcgatgaagtggccctgttcgataaagacgatcggcaaagtaatcctcatgccataaccgctggacttaactatacccccttcccgctgatgaccttcagcgcggagcaacgccagggtaaacagggcgaaaatgacacccgttttgccgtcgattttacctggcaacctggcagcgcaatgcagaaacagcttgacccgaatgaagtcgctgcacggcgtagccttgcaggcagccgttatgatctggtggatcgcaacaacaatatcgttctggaatatcgcaaaaaagaactggttcgcctgaccctgacagaccccgtgacagggaagagtggagaagtgaaaagtctggttagcagcctacaaaccaaatatgccctgaaaggctataacgtcgaagccaccgcactggaagctgccggtggcaaagtggtcacaacgggtaaagatattctggttaccctgccggcttaccggttcaccagtacgccagaaaccgataacacctggccgattgaagtcaccgccgaagatgtcaaaggcaatttgagcaatcgtgaacagagcatggtggtcgttcaggcacctacgctaagccagaaagattccagcgtaagcttaagtacccaaacattgaacgcggattcccatagtaccgccacactgacttttattgcgcatgatgcagcaggtaatcctgttgtcgggctggtgctcagcacgcgtcacgaaggtgttcaggacatcaccctttctgactggaaagataatggtgacggaagctatacccagatcctgaccacaggagcgatgtctggcacgctgacgctgatgccacagctgaatggtgtggatgcggctaaagcccccgccgtggtgaatatcatttctgttagcagttcccgaactcacagcagtattaagattgataaggaccgttatctctccggcaatcctatcgaggtgacggtagaactgagagatgaaaatgacaaacctgttaaggaacaaaaacagcaactgaataacgcagtcagcatcgacaacgtgaaaccaggagtcactacagactggaaagaaaccgcagatggcgtctataaggcgacctataccgcctataccaaaggcagtggacttactgcgaagctattaatgcaaaactggaatgaagatttgcataccgctggatttatcatcgacgccaacccgcagagtgcgaaaattgcgacattatctgccagcaataatggtgtgctcgccaatgagaatgcagcaaacaccgtcagcgtcaatgtcgctgatgaaggaagcaacccaatcaatgatcataccgtcacgtttgcggtattaagcggaagcgcaacttccttcaacaatcaaaacaccgcaaaaacggatgttaatggtctggcgacttttgatctgaaaagtagtaagcaggaagacaacacggttgaagtcacccttgaaaatggcgtgaaacaaacgttaatcgtcagttttgtcggcgacagcagtactgcgcaggttgatctgcagaagagcaaaaatgaagtggttgctgacggcaatgacagcgtcacaatgaccgcgaccgtccgggatgcaaaaggcaacctgctcaatgacgtcatggtcactttcaatgttaatagtgcagaggcgaaactgagccaaaccgaagtgaatagccacgacgggatcgccacagctacgctgaccagtttgaaaaatggtgattatagggttacggcctctgtgagctctggttcccaggctaatcaacaggtgaattttatcggtgatcaaagtactgctgccctgaccctcagtgtgcctagtggtgatatcaccgtcaccaacacagctccgcaatatatgactgcaaccttgcaggataaaaatggcaacccactaaaagataaagaaatcaccttctctgtgccaaacgacgtcgcaagtaagttcagcattagcaacggaggaaaaggcatgacggatagtaacggggttgcaatcgcctccctgaccggcacgttagcgggcacgcatatgatcatggctcgtctggctaacagcaatgtcagcgatgcacagccaatgacgtttgtggcggataaagacagagcggttgtcgttttgcaaacaagcaaagcggaaatcattgggaatggcgtggatgagacaactctgacagcaacagtgaaagatccgagcaatcatccggtggcggggataacggtaaacttcaccatgccacaggacgttgcggcaaactttacccttgaaaataacggtattgccatcactcaggccaatggggaagcgcatgtcacgctgaaaggtaaaaaagcgggcacgcatacggttaccgcaacgctgggtaataacaataccagtgatagccagccggtaacatttgtggcggacaaagccagcgctcaggttgtcctgcagataagtaaagatgagatcacaggtaatggcgtcgatagcgcaacgctaactgcaacggttaaagatcagttcgacaatgaggtgaataatcttccggtaacattcagcagtgcctctagtggactcaccctgaccccgggagtaagtaataccaacgagtctggcatcgcgcaggccactctcgcaggcgttgcctttggtgagaagacggttactgcaagtctggctaataatggtgccagcgacaacaaaactgtgcattttattggcgacacagcggcggcaaaaattatcgagttggcgcctgtcccagacagcataatcgccggtaccccgcagaacagctccggcagcgtcatcaccgccacagtcgttgataataatggctttccggtgaaaggtgtgactgtgaacttcaccagcaacgcagcgacagccgaaatgacgaacggcggtcaagccgtgacgaacgaacagggtaaggctaccgtcacttataccaatacccgctccagcatagaaagtggagcgagaccggataccgttgaggccagtctggaaaatggtagctccacgcttagcacaagtattaatgtcaacgctgatgcgtctacggcacatctcaccttgctacaggcactttttgatacagtctccgcaggcgagacaaccagtctgtatattgaggtgaaggataattacggcaacggtgtcccccagcaggaggtaaccctcagcgttagtccaagtgaaggcgtgacccccagtaataacgctatatatactaccaaccacgacggcaatttttacgcaagctttaccgctacaaaagccggggtttatcaattgacggcaaccctcgaaaatggcgatagcatgcaacaaacagtgacctatgtgccgaacgtcgcgaatgctgaaatcacgctggcagccagcaaggatccggtgattgccgacaataacgatctcacgacactaacagcaacagtcgctgatacagagggcaatgcgatagccaacactgaggtaacatttactctgccggaagatgtgaaggcgaacttcacgctgagcgatggcggtaaagtgattactgatgctgaaggcaaagcgaaagtcacgctgaaaggtacaaaagcaggcgctcatactgttacagcaagcatgactggcggtaagagtgagcagttggtggtgaactttattgcggatacgctcactgcgcaggttaatcttaacgttaccgaggacaattttatcgctaataacgtcgggatgaccaggctgcaggcaacagtgactgatggaaacggcaacccgttagccaatgaggcggtgacattcacgctaccggcagatgtgagcgcaagctttactctcggacaaggcggttccgccattactgatatcaacggcaaggctgaagttacactgagcggtacaaaatccggcacctaccccgtgacagttagcgtgaacaattatggtgtcagtgatacgaaacaggtgactttgattgccgatgctggtaccgcaaaactagcctccttaacctctgtatacagtttcgtcgtcagcacgaccgagggcgcaaccatgacggcaagcgtcactgacgctaacggcaacccggtagaaggcataaaagttaatttccgcggaacctccgtcacgctaagcagcaccagcgttgaaacggatgatcggggtttcgctgaaattcttgtgacaagcaccgaggtcggactgaaaacagttagtgcctctctggcagataaacctactgaagtcatcagccgattactgaatgccagtgcagatgttaattctgcgacgattaccagtctggagataccggaaggtcaggtaatggtcgcacaagacgtagcagttaaagctcacgttaacgaccagtttggcaacccggttgcgcatcaacccgtgacattcagtgcagagccatccagccaaatgatcatcagccagaatacggtctctactaatacgcagggtgtagccgaggtcaccatgacgcccgaaagaaacggtagctatatggtgaaagcatccctgccgaatggagccagtcttgagaaacaactggaggctattgatgaaaaactgacactcacggcgtccagtccgcttatcggtgtctatgcccctacaggcgctactctgacggcaacgctaacctctgcaaatggcactccagtggagggtcaggtcatcaactttagcgtaacgccagaaggggcgacgttaagtggcggaaaagtgagaactaactctagtggtcaggctccagtcgttttgaccagcaataaagtcggtacatatacggtgactgcatctttccataacggcgtaacaatacagacacagacaaccgtgaaagtcactggcaacagtagcaccgcccatgttgctagctttatcgctgatccaagcactatcgccgccaccaacactgatttaagtaccttaaaggcaacggttgaggatggcagtggtaacctgatcgaaggtctcactgtgtacttcgccttaaaaagcggctctgccacattaacgagtttaacagcggtgaccgatcaaaacggaatcgcgacaacaagcgtgaaaggagcgatgacaggtagcgtcacggtaagcgcagtcacgaccgctggtggaatgcaaacagtagatataacgctggtggctggcccggcagacaccagccagtccgtccttaagagcaatcggagtagtctgaaaggggactataccgatagtgctgaattacgtcttgttctgcacgatataagtggcaatccgatcaaagtttctgaagggatggaatttgtgcaaagtggtactaacgtgccctatataaaaattagcgcaattgattacagtctaaatatcaacggtgattacaaagccactgttacaggaggcggagagggtatcgcaacgctgatccctgtattgaatggtgttcatcaagctggtctgagtaccacaatacaattcactcgcgcagaagacaaaataatgagcggtacagtaagtgtcaatggtactgacctaccgacaactacattccctagccaggggttcaccggggcgtattatcagttgaataatgacaactttgccccaggaaaaacggcggctgattatgagtttagtagctctgcctcctgggtcgatgttgatgctaccggtaaagtgacatttaaaaatgtcggcagcaatagcgaaaggattacggcgacgccaaaaagtggaggccctagctatgtatacgaaatccgtgtgaagagttggtgggtgaacgccggcgaggctttcatgatatacagccttgctgaaaatttttgcagcagcaatggctacacgctccccagagcaaactatttaaaccactgtagttcccgaggcatcgggagtctgtacagtgaatggggagatatggggcattacacgactgacgctggttttcaaagtaatatgtattggagttctagtcccgcaaacagtagcgaacaatacgtagtttccctggcaacaggtgatcaaagcgtatttgaaaagcttgggtttgcttatgcgacatgttataaaaacctgtgattttccgttataatttcttaaagagtgttccattcggggcactcttttttacattccctctacagaactagcccttctctcacagaaaatgaataaataaaaatgcggcaccgccagaatcgcgttcgatgtgactatgatcattttcggtgagtactgctttgatctaaaggctggttttctgtgatgattgaccagcctcagagtattgatgacaccaccgttcataacagatcggcattactatgcataagtactgtctcatattctcgccaaaacactttttaatgcctttgcgaattcatccagacttatattgtcaattttttgcccaacgacgactgactccgagacatcggccattgcgggccatcgcgttttgtaatcagcataaattgcaacaacaggggtattataggcacttgccatatgtaatattgaggtgtcaggagttattgcgatataagcatcttttatgattgctgctgaacgtttaatcgagggtggtaaggataaacggtagacattattataacaatccactaatgccctggctttatcttcacctttgggtccatgaacgatcactattggtatatctgtttcactttaaatttttgctattagattttctgcaatcgataatgaaaatgtacgttcctgcgagctaccttctaaattgaacgcaatgtaagatcctaacgatcgcatttcctcgcgcacctcatcgagtacatcctcacttagtggcaattcatatattggcctgactgctggaaaacccgcctcacgcatcataaatgcccatgtcataggtacgggagcccggagtttctgatccatactggacgcgttcttgcacaaaggggagaagcaattcatggttataccaacaacctgaaaattcgtttttgctttcaactgactgataaataacatcgttttcaggttctttttacgcatcccctcaatgcaaagatccggcgtaccgtattgctgtgttatgttctttgctaaatcttttatttcttttaatgttgcgtgatcctgcatagtcattgtgactaatgttaatttagtctgttcaagtttaagcgcattaaagacttctaaattaattgtcgacgttacaattaaaagatgcttaattttatgcaattcaagcgcccgaataacaggaaagatggccatagcatcgccaatctgatcgggaatatggatgacaacaaagtctgttttttcaatattgaaattataagctttataatcgtagtaactaaatgcaatacgtctcaacaatgatgctaaaaacatacctaacctcgcctccctactggttataatgcaatgcagtctatcagactcatcagggtgccattttgtgcatatgcggacttttatgtttcatatctctaacctgtgggtcctctgcttaatccttaaacaacaccagcaactcctgcgctttcatcttccatcgaatttttcatgttgccgctaatcagccataaaatcatttgcagatgcgctctgtcgaggtagtctcataaggttcgtttatagatcgacggcaatgtgagttaccttttccatactaattataaaaagacagtacaaacaggatcattatggactccacgctcatctccactcgtcccgatgaagggacgcttagcttaagtcgcgcccgacgagctgcgttaggcagcttcgctggtgccgtcgtcgactggtatgattttttactctatggcatcaccgccgcactggtgtttaatcgcgagtttttcccgcaagtaagcccggcgatgggaacgctcgccgcatttgctacctttggcgtcggatttcttttccgtccgctcggcggtgtcattttcggtcactttggcgaccgactgggacgtaagcgcatgttaatgctgaccgtctggatgatgggcatcgcgacagccttgattggtattcttcctagtttcagcaccattgggtggtgggcacctattttgctggtgacactgcgtgccattcagggatttgcagtcggcggcgaatggggaggcgcggcgttgctttccgttgaaagtgcaccgaaaaataaaaaagccttttacagtagcggtgtacaagttggctacggtgtaggtttactgcttagtaccggactggttagtttgatcagtatgatgacgactgacgaacagtttttaagctggggctggcgcattcctttcctgtttagcatcgtactggtactgggagcattgtgggtgcgcaatggcatggaggagtccgcggaatttgaacaacagcaacattatcaagctgccgcgaaaaaacgcatcccggttatcgaagcgctgttacgacatcccggtgctttcctgaagattattgcgctacgactgtgcgaattgctgacgatgtacatcgttactgcctttgcacttaattatagtacccagaatatggggctaccgcgcgaacttttccttaatattggtttgctggtaggtggattaagctgcctgacaattccctgttttgcctggcttgccgatcgttttggtcgccgtagggtttatatcacaggtacgttaatcggaacgttgagcgcatttcctttctttatggcgcttgaagcacaatctattttctggatagttttcttctccataatgctggcaaacattgcgcatgacatggtggtgtgtgtgcaacaaccgatgtttaccgaaatgtttggtgccagttatcgctatagtggcgctggagtcggttatcaggttgccagtgtggttggcggtggatttacaccttttattgccgctgcactcatcacttactttgccgggaactggcatagcgtcgccatttatttgctggctggatgcctgatttccgcaatgaccgctttgttgatgaaagacagtcaacgcgcttgatagcctggcgaagatcatccgatcttcgccttacacttttgtttcacatttctgtgacatactatcggatgtgcggtaattgtatggaacaggagacacacatgaataataagggctccggtctgaccccagctcaggcactggataaactcgacgcgctgtatgagcaatctgtagtcgcattacgcaacgccattggcaactatattacaagtggcgaattacctgatgaaaacgcccgcaaacaaggtctttttgtctatccaagtctgaccgtaacctgggacggtagcacaaccaatccccccaaaacgcgcgcatttggtcgctttacccacgcaggcagctacaccaccacgattactcgccctactctctttcgtagctatcttaatgaacaacttacgttgctgtatcaggattatggtgcgcatatcagtgtgcaacccagccagcatgaaatcccttatccttatgtcatcgatggctctgaattgacacttgatcgcagtatgagcgctgggttaactcgctacttcccgacaacagaactggcgcaaattggcgatgaaactgcagacggcatttatcatccaactgaattctccccgctaagccattttgatgcgcgccgcgtcgatttttccctcgcacggttgcgccattataccggtacgccagttgaacattttcagccgttcgtcttgtttaccaactacacacgttatgtggatgaattcgttcgttggggatgcagccagatcctcgatcctgatagtccctacattgccctttcttgtgctggcgggaactggatcaccgccgaaaccgaagcgccagaagaagccatttccgaccttgcatggaaaaaacatcagatgccagcatggcatttaattaccgccgatggtcagggtattactctggtgaatattggcgtgggaccgagtaatgctaaaaccatctgcgatcatctggcagtgctacgcccggatgtctggttgatgattggtcactgtggcggattacgtgaaagtcaggccattggcgattatgtacttgcacacgcttatttacgcgatgaccacgttcttgatgcggttctgccgcccgatattcctattccgagcattgctgaagtgcaacgtgcgctttatgacgccaccaagctggtgagcggcaggcccggtgaggaagtcaaacagcggctacgtactggtactgtggtaaccacagatgacaggaactgggaattacgttacagtgcttctgcacttcgttttaacttaagccgggccgtagcaattgatatggaaagtgcaaccattgccgcgcaaggatatcgtttccgcgtgccatacgggacactactgtgtgttagtgataaaccgttgcatggcgagattaaacttcccggccaggctaaccgtttttatgaaggcgctatttccgaacatctgcaaattggcattcgggcgatcgatttgctgcgcgcagaaggcgaccgactgcatagccgtaaattacgaacctttaatgagccgccgttccgataataagttctgaaccttcttatcagaaatagatgtgaaggagtaagtaagacacctggcaaatagcctgcaataatcgtgggctgtttgcttccttgggcggatacgagttttattatcgtcttaatgatttccacatattaaaagcaagtatgctttcaaaacacaattataaaaaatcccgccaacaatataagtttttataaaattaaatataagattatggctttagaatatttttatttctaatagacgagatttttcctgttatgatataatatgctgaattaacacatgttaacgatttaccagtaatgtaaataaattttcgaggagatcattccagtgggacgtaaatgggccaatattgttgctaaaaaaacggctaaagacggtgcaacgtctaaaatttatgcaaaattcggtgtagaaatctatgctgctgctaaacaaggtgaacccgatccagaattaaacacatctttaaaattcgttattgaacgtgcaaagcaggcacaagttccaaagcacgttattgataaagcaattgataaagccaaaggcggcggagatgaaacgttcgtgcagggacgttatgaaggctttggtcctaatggcagtatgattatcgccgagacattgactagtaatgttaaccgtacgattgctaacgttcgcacaattttcaataaaaaaggcggcaatatcggagcggcaggttctgtcagctatatgtttgacaatacgggtgtgattgtatttaaagggacagaccctgaccatatttttgaaattttacttgaagctgaagttgatgttcgtgatgtgactgaagaagaaggtaacattgttatttatactgaacctactgaccttcataaaggaatcgcggctctaaaagcagctggaatcactgagttcagtacaacagaattagaaatgattgctcaatctgaagttgagctttccccagaagatttagaaatctttgaagggcttgttgatgcccttgaagatgacgacgatgtacaaaaagtttatcataacgtcgcaaatctctaattatcttttaaagaaatctgtctttacggcagatttctttaatctcatataattcttataaaaaatataatattcaactcgtcatattgattatacccccccgttcccagagaaataatatttattaaaattccagttcttctttttctgattacagaaggcaaagtggcaattacgcatagtttcccgataaagacgcgatagcgacatcccgcataaggcatttttctctttatctttgtacggtacttcatggaacagagtttttgaccttgcgaatcgtgatgtctgttggggagggacaatttgctcactgaagcgtgagactcgattaagcgcacgaaacacagaaatcaaaaaacccggtcacttttttacaaggtaaccgggtaaaaataatttttattttttaactgttttgagactcatagagatgtctcaaaactaaaatttggctcctctgactggactcgaaccagtgacatacggattaacagtccgccgttctaccgactgaactacagaggaatcgtgagaacgaggcgaatattagcgatgcccacccacaatgtcaaagcctgttttttaaatttgaaatcgtttgctgaaataatctgcattttgtcgtttattcgctcacaactggctttttttcacacttttgcggctcgggtcgagggtatttccatagccaacgtccagtaaccattcgccagtaaaacagcacggcccgcacagcccagtcggcaaacattcccatccagacaccaaccacaccccagccaagcatgattcccagcacataaccgactacaacccgacaaccccacatgctcaacatgctaacccacatggcgtaacgggcatcacgagcacctttaaatccagcgggtagcacccaactggcggaccaaataggcataaataaagcatttagccaaatcagaatcacaacgacatgtttaacctgtggatcctgggtgtaaaagcttgccataaccccggcaaagggagccgttagccaggcgatggccgttaatccaagagtggaaagccagaacacatgccgcaactgaatctctgcttgcgctatctgccctacccccaaccttcggcctgtaatgatcgtagaagcagagccgagcgcacttccgggtaagttgataagagccgcaatactaaacgcgataaaatttccggcaataacactggtccccatcccggcaacgaacatttgggttaataaccgaccactggtaaataacacactttcgacactcgcgggaataccaatccccatgacttcccagataatgctaaaattcagcggtttaaaatagctctttaagctaatccttagcgcaggattaaaaccaatcgccagcacccacaaaattgcaactgcgccaatataacgagaaatggttaaacccagccctgccccgacaaatcccagtcccggccaggagaaaaggccgtaaatcaatatgccgctaataataatattaagaatattcaggctaccgttaatcaatagcggtattttcgtattccctgcaccacgaagtgccccgctaccaataagagtgatggcagctgctggataactgagtaccgtcagctccagataagtcaacgccagtgctttaacttctgtcgtggcatcacccgcgacgaaatcaataatttgttcgccaaaatgatgaataagcgttgccaacagtacggcaaacaacgtcatgatcaccaaactctgccgcgtcgccaccctcgctcgtcgtcgatcccgcttaccgagactaaatgccacaacgacagtagtaccaagatcgatagcagcaaaaaaagccataatgaccatattgaagctgtccgccaatcccacgccggccatcgcatcttttcccagccagctgaccagaaaagtgctcagaacccccatcaacaggacacaggcattctccatgaagataggaacagcaagcggggttatctcgcgccagaacaacactttgtagctcttgcgtttagcgtgccagcgagtgccgtgaacaacctggcgtaaagcagaggagatattcaaagcgctccttaattgcagaaagtgaaaccacatttcaaataaactgggagaatcagcaaagctgcaaagattttcgccaacaaattgtctgcaaatgcaacaaactgtacttagaaacggcaaacagttggggaatttaaaaatcgggttactcaaaagatttttcgccgttaagatgtgcctcaacaacgattcctctgtagttcagtcggtagaacggcggactgttaatccgtatgtcactggttcgagtccagtcagaggagccaaattcctgaaaagcccgcttttatagcgggatttttgttatatctgataatcaatttcctcttcactgctttccatcacctgccgcttgatatcctcaacactcagtcctgcattacaaagttccagaaagcgccagacatagttacgctgaagttgtcctcgcttcagtcccaaccagacagtattagcatcaaaaagatgccgcgtatccaggcggattaaattctcttcctcttgttcgccactggattgctcggcaactaatccgatcccaagcccaagagcaacataggttttaatgacatcagaatcctgcgcacttaatacaatatctgccagcaaacctttgcgggcaaatgcgtcatcaatacgactgcgccccgtaatcccctgtcggtaagtgattaacggccacttcgctatactttccagcgtcaatggactaatttgcgtcaagggatgatcgtgtggaacaagcaaactatggtgccaacgaaaccacgggaaggcgacgagctgcgggtcattactcaaacgctcgctggcgataccaatatcagcttcgccattttgcaacaatgtcgcaatttcctgtggcgtcccctggattagctcgagccgaacctccgggaaaagttcgcgaaaagctttaatgacctctggcaagctataacgtgcctgagtatgcgtcgttgcaatagtgagaacgccagacgtatcgttggtaaacaggtctgcaagccgacgaacattactggcttcattcagaatacgttctgcaatgaccagtaatgctttgcccggttcagtcatgcccagcagtcgcttacctcgtcgaacaaatatttcgatgccaagttcatcctccagttcccgaatatgacggctgacgccactctgactggtaaaaagcatattcgcaacctctgtcaggttgtaatcctgacgtgcagcctcgcggattatctttagttgttggaaattcacggtaaactccgggcagttcagatttcccgttattgttaaagtctaatgcccggcataacaaataataaaaacccgcatcttattccatcccgatataacacttagctcaccaattgccactgccttttttccatcactggagaactaatcacactcattaacaactctttcactgcctgtgcctgtgggcttaagttcgctctggcgggtaaatttaaactcaaagagagactcatggaaggagtggtaatgcgactcatccacccatttactgcgccacataagctacgcgcggcgctttcgggtaatactgcaacgcccatgccgctggcaatcgctgcggtaagcgtggcaatagactcaatttcaccaataacttttgccgtgagtcgccgtagggaaaaagcctcatcaacacgaagtctaatagcactgtaatcactggggagaaagaggttcatttgcgcaatagcattcacatcaacgctttgccccgggcaatcttgagttcctaccagaaaaagatcttctttcagcaaagcctgactggatacaccagccacaggggaatgctcataaatcaccgccatatcgagttggtgatttatcaatttttcgttaagcactgcaccactattttcatgaagatagataacgatctccggaaattcagcgcgaaccgcctgtaataagggcatggtgatggaactcgcagcggttcctggtgcaaagccaatgctgacttgcccgcttaatgcctgaccaacgttatgcaccgccagttgggcctgttcacactgacgtaaaatggcccgcgcatgggtatagagaatttttccggcgtctgttggtgtaacgccccgctttgtacggatcaaaagttgttgatttaactcaccttccagtgtggcaacctgctggctgagcgctggttgtgcgatatgcaatacttcagcagcctgggtcaggctaccaatatctacaatttttacgaagtatttcaggcgtctgaagttcatgttgcctccggtttttaagaatcggcccaagtgccgccattacttacaaccagattgcaagatgcttgccagttttattttggtgttgatgtacaagctaaccaactgtcaaataagagattatgatagattcgtcatttgctcctttaatcagctgtcgcgttcccctgccctataaaaggagggtatgcaccacgatggttcattacccaataagattgaaagctcaccactttgttgaaattgacagcaaacaaacaaaaaaatgcatttcaccctttgacatcaccatgcactgccattaatatgcgccccgttcacacgattcctctgtagttcagtcggtagaacggcggactgttaatccgtatgtcactggttcgagtccagtcagaggagccaaattcaaaaaagcctgctttctagcaggctttttgctttctaattaccaacgctcttaaaacatctgtctactaccagaactaatttgcacaggcattccgcttcgacgttgcaacgcagcatttgcgcgatttacatcaacttcttgcccgttgataaacgcccgcaaagatggggttaccggcaatggcacttttcggtcagactcatattctgcacgattgcggctcaatggctcatgaacttccagccagttgctgccatctggttcagtggtgtattttactggctggtcgataatttgcacacgcgtcccaacaggaacattatcaaacagatatttgatatcgtcattgcgcagacgaatacagccctgacttacccggagcccaataccaaaattggcattggtaccatggatggcatacaacctgccaatataaatcgcgtacagccccatgggattatcggggcccgcaggaacaaatgcgggcaaactctcccctcgtttcgcatattcgcgccgagtgttcggcgttggcgtccaggttggagcttcttgtttacgttcaacggtagtcacccagttacgcggggtttctcgcccagcctggccgataccaataggaaagacttccacagtattactgtctggtgggtagtaataaagacgcatctcagcgacgttaacaacaatccctttacgaacagtgtcgggcaaaatcagttgctgcggaatggtgagttggctgccagacttcggcaaaaaaacatcagcgcccgggttcgcttccagcatgttacttaacccttgcccgtattgtgcggcaaaagtctccagcggctgggtattgtgatcaggaacagttacagtaaagctctgccccactaaacggctaccctctggaggtaatggataagttaccgccaggctagtatggctggcaaaaagcagagcaaaactgcaaagaatatttacacgacgcatcatgtccctttcctatgtcgcgaaagctatccgttaagtatagcttttatcagacttttcgtttttaactgttcaaatcagaagtcgtattccccggtagaacaatattactggcagcaagttcgcccatgttgttgtatatcgcacaggcagcttcgatgatgggcatcgccagagctgcgccactcccctcacctaaacgcatctccatattgagataaggctccagccccaaatggctgagcgctatacgcgcgcctttttctgcgctcaggtgagaaggaatgagatacggtttgatcgcaggagacatctggcaggctgcgagcgcagcagcataagaaagaaatccatccagcaacacgggtaaaccgcaggaagcagcacctaacatcactccagctattccgaccaaatcaaatccacccacttttgccaggacatcaacaccatcctgaggatttggttgattcaacgtaatcgcccgacgcacaacatcaattttattagccagtttatctgtcggcaggtttgcgccaatcccaaccacttcttcaggatcccggccagtgattgtgctgactattgctgctgccggtgtcgtgtttgccatccccagttcacctacaccaaacagcgtgacaccgttttttgccagctcctgcgtataacatatgacgtccaaaagcaacttttcagcctgacggcgactcattgccggagcactagcaatattgccgctacctcgtgcgacacgcatgttgataagcccggggataggctcagcagtatcaataccaacatcaattacgtggacgttagcgcccgcttgttctgccagcacacacacgccggttgttccacgggtcatattttcagcctgtatggctgtcacttcttttggagaaatagcgaccccttcctcccagacgccgtgatcggcacacataaccagtaccgcttttttgcccacatgcggtatgccattcaaccccggcattcctgccagttgtatggcaagcacctccagctttcccaggctaccaacaggtttgagtaacccgtcaatatgccgttgtgcacggctcatagcggtagaatcgatggctgggatcgtattcagtaaatcggcaagtatttgcatctcacgtctctttatagcagtgccagcaggaagaccagttcaccaagctctatggctgctcccagcgtatcgcccgtttgcccgcccagcgtacgtttgagaagctgaccgaggatgaaaatcgccaccatcgtcaccaccatagcagccacaccatgcatacccggcaataatacggcagcaaaaatagcggctaagccgagtgtgacgcaggtttgtcgcccatcaattttgccaatgaacacattgccaagcccttcttcccgcgcataacgatgacgatacatcaataatgcggcagtcccgcggctgaccgcacatgctgccgccaggcttgcaaggatgctttcgccacgcagagccaactcgcttaacaccagaatctttgccagtaccacaaaaatcaatgccagaccgccgtgggtgcctaaacggctatcacgcatgatttccaacatgcgatcgcggctacgtgcagaaaatacgccatcacaggtatcagcgaggccgtccagatggaatcccccggtcatcagcaccagcacaagtacgctaaacagtgccgccagtggtgcgccacaccatgcctgcagcaccatgaagaccagcccgctaatcgcgccaagcaataatccaatcaaaggaaaagtaataataccgcgagaataatgctcgaaatccagtccctgggaccagcgacgcggtacaggcagacgcgtaataaaactgagcatcgcccaaaataatttactcatttgatttttactccaataccgctaaccaccagccatacttcatttgccgcagcggccaactgctgatttacccgcccggcaatatcacgaaaatgtcgtgccagacgactctccggcacaatccccattcccacttcgttagtcactaatacaacctttgcggggcaacgttggcaggcagcaatcaagctctgaatctcagcattaatcgcctgttccatcgcctgataatcccattcatcagggtctttatcgccgccataatcaaacaacagattagtcaccattgtggtaacgcattcaagcaacacaacctcattcgggttaatgtctgcatgaattaattcatcaagatgttgccagcgctccactgtgcgccagtgctccgggcggccttgccgatgatgttctatccgtgcagccatctcatcatcaaggatttggctggtagcgatatacagaacctgactagagtccccaataagcgcctctgcgtggcgactcttcccgctccgtgcgccccccgtcaccaaaatcatcataccgactcctgattcaaatgtatgatggtattcattgaacagaacaatggatcccccaccgttgctgaccgcaaaacatttacgcgattaatactgcgcgtaatataattaaaaatccagcattctcaatccattacgaaataagatggcattacggaatagccagactttctcgtgttaacgtccgacaaaatgcgtcattgacagcggtttctgtggattgacacatttcattcagataatgaattaatgctactgccggaacaaccagcaaacgggcattgtgttctgaaatccaggctattgattcaacgtcagcgacagatctgcgctgtaaaagaacttgtaaaacaacgtaatagaattatccggaatggtggcgactatgcactagggaaggtgcgaataagtggggaaattcttctcggctgactcagtcatttcatttcttcatgtttgagccgattttttctcccgtaaatgccttgaatcagcctatttagaccgtttcttcgccatttaaggcgttatccccagtttgcagaaactccgtaatgagattaaaagcgctcataactcatctgtcggccagaaggcgcgcctctgaattatccgacggacaaaccgggaacagtgtaatttcccggcaggagcgaaaaaattgaaaggcgcatcttactcttttcgctttcaaaaaaaagagtggtcatcgcgttaacacaccgccctgagatgaattagtgatgttttggctgcaccgcaacatacatttcgatatcccagtacccatcttccgcgccattgttcaaataaacctcgaagcagggctttggtaacatttcataagcactgtcctgcaagagactattaaagaactgataccagggtttagcaaaatcatcaccgactacacgagctaccgccaccgcatactgaccacctgtaatttctgtcagaatgacgccctcactgttttcgggaagcgtaaagtaacccggcaccgtcacgacggtgtcgcagcgtaatttttcggcgggtgtttcatctggattgtcgtaatagacagcaacccactccttcggcacaatatttttgctatctacccacatcatcaactgctcaaagcctttctttaccgtctgttcccacgggccaacgagatggaaacctgcaacggtacgtttctcttcctgcttaatctcgtagttcatgacgcctccattgatactgtttttatatacagtatagttgcaaaattaaaaccacaaggaatgagtgttgattatgcgagcagactcgcactcctgccagtctgctgcaaaagaaaggtcaggccttatggtggaaataatcactcaggcgagaaaacatgctgccttccccgacagattccagggtaaccagcggccagtgcgccacctgtttatcacggtcgtaaagttcaatttcccctacccgctgatgggcgctaattggcgcggtgagttctttaccatcaagggtatatttggctttgatatgtggaatttcggctttcggtagcaccatccagaactcttgttccgttcccaggtcgatattttctttatcgccataccagatgcgttccgttccgacctttttcccacggtgcaaaatttgcaccgtagtaaagttttgttgcccccaacgcagtaattttcttgcctcttcctcacgaccttttgcactgtcagcccccattaccactgcaatgagacgacgctgcccatctacagcgctagcaatgagattaaacccggcaccagaagtatgacccgttttcaggccgtcaacattcatggttttatcccacaacaacccgttacggttttgctgggtgataccgttccaggtgagacttttctcactgtacatatgataaaactcgggctcgccgtggatgatagcacgagaaagcacagctaaatcataagcgctgctatgctggccaggtgcatccagaccatgcactgtttcaaaatgcgtatccttgagatgcagcttctcggcatagttgttcatcatttcaacaaactgccgttgcccaccggcaatatagtcagccagagcaacacaagcgtcatttccggaatccacaattaaaccacggcttaaatcacgtacgcttacgcgatcgccctctttcaaaaacatcagactagaaccgacaaacaccggattatctttcgcccacgcatcgcgccccacggtgacaatatcgtctggcgtaatgcgatgactatcgatagcgcgatccacgacataacccgtcatcagctttgtcaggctggcgggattgcgctgttgatgctcattacccgcggtgaggatctgaccggtggtgtaatccatcaatacccaggacccggcatgaatctctggaggctgaggactaaaaggaatgttttccgccgcaaaaccagagcttaagttaaaaacgaacaaagaagcagcaataataagacggcgtttcaacagcaaaccctcaggagtttcaaatagctgttctttttacggaaatacttatgaactggctggaataaagtgcaagaaaatgtgactaccctctcatttttatctgacatgatctgttgccactcgctgccaaattgtggcgctaaagctgattagcacggtgatatttgatactctggcagacagcagaaataacggatttaacctaatgatgaatgacggtaagcaacaatctacctttttgtttcacgattacgaaacctttggcacgcaccccgcgttagatcgccctgcacagttcgcagccattcgcaccgatagcgaattcaatgtcatcggcgaacccgaagtcttttactgcaagcccgctgatgactatttaccccagccaggagccgtattaattaccggtattaccccgcaggaagcacgggcgaaaggagaaaacgaagccgcgtttgccgcccgtattcacagcctttttaccgtaccgaagacctgtattctgggctacaacaatgtgcgtttcgacgacgaagtcacacgcaacattttttatcgtaatttctacgatccttacgcctggagctggcagcatgataacagccgctgggatttactggatgttatgcgtgcctgttatgccctgcgcccggaaggaataaactggcctgaaaatgatgacggtctaccgagctttcgccttgagcatttaaccaaagcgaatggtattgaacatagcaacgcccacgatgcgatggctgatgtgtacgccactattgcgatggcaaagctggtaaaaacgcgtcagccacgcctgtttgattatctctttacccatcgtaataaacacaaactgatggcgttgattgatgttccgcagatgaaacccctggtgcacgtttccggaatgtttggagcatggcgcggcaataccagctgggtggcaccgctggcgtggcatcctgaaaatcgcaatgccgtaattatggtggatttggcaggagacattagcccattactggaactggatagcgacacattgcgcgagcgtttatataccgcaaaaaccgatcttggcgataacgccgccgttccggttaagctggtgcatatcaataaatgtccggtgctggcccaggcgaatacgctacgcccggaagatgccgaccgactgggaattaatcgtcagcattgcctcgataacctgaaaattctgcgtgaaaatccgcaagtgcgcgaaaaagtggtggcgatattcgcggaagccgaaccgtttacgcctagtgataacgtggatgcacagctttataacggctttttcagtgacgcagatcgtgcagcaatgaaaattgtgctggaaaccgagccgcgtaatttaccggcactggatatcacttttgttgataaacggattgaaaagctgttgttcaattatcgggcacgcaacttcccggggacgctggattatgccgagcagcaacgctggctggagcaccgtcgccaggtcttcacgccagagtttttgcagggttatgctgatgaattgcagatgctggtacaacaatatgccgatgacaaagagaaagtggcgctgttaaaagcactttggcagtacgcggaagagattgtctaatttgaagcctccgccgctggtacggcggaggacaatgttgagtcaggctttttgaacggtgatgctccacgctgcatcgccaatctgctgataatcggtgatggcatgtccttcttctgccgcccactgtgggattgcttcagttgcctgggtgcaatcaaactcaatcactaactcatcgccgctgaccatttctgccagagctgcttttgcttctatgagtggaaacggacagacctgcgtcaccacatccagctttttaatcaccatctttacaccttacttaatttgccgcagcagttgccagtcgcgccttacgctgcggtcgaacatacacaagccaggacgcagtccagactccgagaatcataaatacaaggccaatccagccctgccaggtcatcattgcagtcataaccagtccattaccgatagagcaaccacctgcaatactggcaccgaagcccatcagtacaccacctaacccgctacgtaatgttgtttgtgcatcagctgcgcgaacgcggaactcacggctcgctttggctgcaataaaactccccacgaagatccctaacaccaggaaaacgccccagttaatgtatttcatgtcacccgcgaccagaaattgcagaatattggccgttggggaagtgattcctaacccaaacatgcgtccggttgcttcactcaggggccaggctaaaagcgcaatcaaaccgatgagtacagctgtgacaaagggatgccagcgtttttcaaacagaatatgagcgatcccggttcggcgcggcggtaaggtcgcgactttgagttttggcttcttcaactctttcatcaccacccagagcgttatcaccagcaaaacggcaaccaacggccacacagacaaattaaaagtctcagcaatagagttatgttcagtactgtagtgctgcaaggtttgatttaaaccactggcatgtggagaacgcatcaccgcactcatcaccatataagtgaaaagcgcgatccaactgccgatcaatccctcacccgcgcgataccaggtcccggtggcacatccacccgccagaacaattcccagcccgaagatatacccacctataacagtaccaagccacgggaacgccccggcttcgtaagtcagtaggcccgcctgaattaacgcaaaaacccccacgctttgtacgctaattgcaatcagcaaggcgtaaaacatgcgattatttttcacgatatacatatcgcgaaaaccacctgtcaggcaaaaacgcccacgctgcatgacaaatcccagcagagcaccacaaattagcccgcttaatatcatactaaacataaattaattaaccagatgaatgttaatgaggaaattattcatgactggtggaatgcagaccaataaccaaattctctaaattagaacaaatggttattaatgaggagttcgatacaaaagaataaaaaaaccggagccaaatgttcattcgactccggtttattattagaaaagatgattatgctacgtcttcgtactgcggaaccggattacggaagctcttggtgacgcaagccaggtaaatcagaccgatagcagcccagatcagacccagaaccatactgctttcttccaggttaacccacagcgcaccaacggtcagcgcaccacacatcggcaggaacagatactggaagtgatctttcagcgtcttgttacgcttctcacggatccagaactggctgatgacgctcaggttaacgaaagtgaacgccaccagcgcaccaaagttaatcagcgccgttgccattaccaggtcgaagttgattgccagcagggcaatcgcgccaaccaggatgatgttcatcgccggagtacgccatttcgggtgtacataaccgaagaagcttttcgggaatacgccgtcacgacccattacgtacatcagacgcgctacgcctgcatgcgccgccataccggacgccagtacggtaatggtggagaagatcagcgcgccaacctggaacgctttacccgcaacgtacagcatgatttcaggctgactcgcatccggatctttaaagcgagagatatccgggaagtacagctgcaggaagtaagttgcaaagatgaagatcatgccgccgatcagcgcggtcaggaaaatcgcacgcgggatcacgcgctctgcatctttggtttcttcgctcaggttgctgatgccgtcaaagccggtaaaggagaagcacaggattgtcgccccggtaatcatcgggataacatgcgcatcgccagaccagaatggacgagtgctcgccagcgtaccagcgccttcaccttcaaatacgccataaacaaccatgcccagaatcaccgcgatcagcactacctgcaacacgacgattacagtgttgaagttcgctacggatttcagactacgcaggttaaaggcggtcataaaggccaccagcgccaccacaaacatccagcttgggatggaaggcaccagagcttcaaaatagattttcgccagtagaatgttgatcatcggcgcgaacagatagtcgagcagagaagaccaacccaccataaagccgacagtcgggctaatggatttctgggcgtaagtgtatgcagagccagcagaaggatagcggcgaaccagcttcccgtagctcagagccgtaaacaggatcgcaatcaatgcgaacgcataggctgtcggcacatgaccatccgtgaggccactaacgataccaaaagtatcaaacagcgtcatcggctgcatataggcaagacccatcattacaaccggaactaacgtaagcgttttacgcaattccacgcgagaggtgtttggagtaacgttatggctcatggtcattctcctttacggtgataaccgtcgcgtaagcaaaaaattgccccatttttttggattcctcagcgacaacaactgtcgatttttagtaaatatctatccggtacgaagcccggcctcttggtatgaatgattggtttgaagcaaaaaataaccgacgctgatgaaacgtcggtttttagtcattttttgacagcggcgcattgtgcctaaatgggggggaaatgacaagagaatgagaggcttgtcagaataatttttctttaaatggcactttttccgtcatcagattttgcataaacaccggcgatcgcactatttgctaaaatttcatcccgccaccagccactggcaagtcctgcggtctgttcgttccagccaatccagacgggttcaaagagagtttgggcgaccactttcttctcgattaacgcgccactatcgagaaaacgttgcgccagataacggggtaaatagccgcagccgaggccgctaatttgcagctccagtttggttttaaaatcgaaaacggtaatggcttcttgttcgtcgagaagttgacttgccgtagaagcgcctgcctgcgcagtatcccccaccacaatcgcccgatatcgcttaataatacgacgatttaacggctcttcttccagggctaacggatgatgaggcgcgaccgcaaagacttgttccagatcgcccaaccgactaaaaccaaactcactggaagatggtggctcatgcatcgcgccaacaataatatccgctcgcccctgagtcagggcatcccaactaccaccgagtacgccattgataaacttcaggcgcgtcacgctatgatgttgataaaaagcttcaatgagtggcgcaagcagagaaaaaggaaacgtgtcgtccacgccaatcaccagctcgttttcccagccttcatgcagtttgatcgcctgcttttccagttcccgcacggtatgcagaacttcccgccctttctctaataacatttttccggtgcgggtgaatttagcgcggtgtccgctacgatcaagcaattgaatattaaggtcgctttccagcttgtgaacggtgtaactcagagcggacggcgtcttgtagagtttggcgctcgccgccgcaaaactgccttctttttctaaggcatcgaggatcatcaacacatccagcagtggtttcatacacgcccccttgcagtgcatgcggcgtcctgctggcgtgatcgtttactccagcggcattaccagcggatcgggatactggtattcaaatcccagttcattacaaatccgactgccatcaataatcttacctttgccgctgtccagactatttctgaactgcggaggttccagccccagtaaacgggccatctgcggatagaaaacattacgcgcagggtgagctggcgcacatatattatagatgtgtccgcctttaggtgcctgtaacaacagagtgatagcgccaataacatcttctaaatggactaaattaacaccatgttcaccatcaggcgcggtttttccggcaaagaagcgtccgggatgacgtcccggtccgaccaggcccgcaagacgcagaatatcgacgctagtaccgggtaaattgtgcagccagtcttcgagttcttctaatactcgtccactgttggttactggattacgcggggtggtttctttcaccgtgccttgcgcgtcgccatagacagatgtactgctggtaaaaataatgcggggaatacgatgggccagcgcgctatccactaactcttgtaccgcttgtaaatagaactcatcgccggggccgctacgacgtgccggaagcgtaatgaccagcgcatcggcatccatcagggcatccagatcgtcagaatcgcaaactagctcaggctccatgcgaagcagatagctatcaatgccactcattcgggccgcttcgacaccatcttgtgtggttttactcccggtgacttgccagcctcgcgcactaagactcatcgccagcggcatgcctaaccaccctaacccgacaattgcgacctttttcatccgttatctcctgatacaccttagatctataaggctacgctagcgtatcaaaactgacaattcattctatgaatgaatctgttcaataatgataacgacatgctgcaatgagcagactatcgtcggtaaccgcgtataccagacggtgctcctctgtaatgcgtcgggaccagaaaccactcaaattatgtttcaggggttctggcttccccttaccttcaaatggcgttctgcgggtatctttgataagttcattgatctttttaacaattcgcttatctgtttcctgccagtacagataatcgtcccaactttcctcagaccagattagtttcactcaatgatgtccttttccgttcctttgccacttttcaggctatcgatactgtccatcaatctccgggcgttagcgggggagcgcagtagataagccgtctcttccaggctgttgtattcttcgagactcatcagaacacaagcctctccattctgacgagtaataaggatcggggcatgatcttcaacggctttcatcattgttgcgctcaaattctgacgcgcttcgctgtagctaattgtacgcatgtcaatctcctcttttgtacagttcattgtacaatgatgagcgttaattaactatttattaattagtttgtagatcaaggtattgtcagtgagacgaaaatccaggcttcgctatttttggtgccatcagctaagaggacagtcctcttagccccctcctttccccgctcattcattaaacaaatccattgccataaaatatataaaaaagcccttgctttctaacgtgaaagtggtttaggttaaaagacatcagttgaataaacattcacagagacttttatgacacgcgttcaatttaaacaccaccatcatcaccatcatcctgactaatctttcaggcgatgtgtgctggaagacattcagatcttccagtggtgcatgaacgcatgagaaagcccccggaagatcaccttccgggggcttttttattgcgcggttgataacggttcagacaggtttaaagaggaataacaaaatgacagacaacactcgtttacgcatagctatgcagaaatccggccgtttaagtgatgacagtcgcgaattgctggcgcgctgtggcattaaaattaatcttcacacccagcgcctgatcgcgatggcagaaaacatgccgattgatattctgcgcgtgcgtgacgacgacattcccggtctggtaatggatggcgtggtagaccttgggattatcggcgaaaacgtgctggaagaagagctgcttaaccgccgcgcccagggtgaagatccacgctactttaccctgcgtcgtctggatttcggcggctgtcgtcttagcctggcaacgccggttgatgaagcctgggacggtccgctctccttaaacggtaaacgtatcgccacctcttatcctcacctgctcaagcgttatctcgaccagaaaggcatctcttttaaatcctgcttactgaacggttctgttgaagtcgccccgcgtgccggactggcggatgcgatttgcgatctggtttccaccggtgccacgctggaagctaacggcctgcgcgaagtcgaagttatctatcgcagcaaagcctgcctgattcaacgcgatggcgaaatggaagaatccaaacagcaactgatcgacaaactgctgacccgtattcagggtgtgatccaggcgcgcgaaagtaaatacatcatgatgcacgcaccgaccgaacgtctggatgaagtcatcgccctgctgccaggtgccgaacgcccaactattctgccgctggcgggtgaccaacagcgcgtagcgatgcacatggtcagcagcgaaaccctgttctgggaaaccatggaaaaactgaaagcgctgggtgccagtagtattctggtcctgccgattgagaagatgatggagtgatcgccatgagctttaacacaatcattgactggaatagctgtactgcggagcaacaacgccagctgttaatgcgcccggcgatttccgcctctgaaagcattacccgcactgttaacgatattctcgataacgtgaaagcacgcggcgatgaggccctgcgggaatacagcgcgaagtttgataaaaccacggttaccgcgctgaaggtgtctgcagaggagatcgccgccgccagcgaacgcctgagcgacgagctaaaacaggcgatggcggtggcagtaaagaatattgaaaccttccacactgcgcaaaaactgccgccggtagatgtagaaacgcagccaggcgtgcgttgccagcaggtcacgcgtccggtagctagtgttgggttgtatattcctggcggctccgccccgctcttcagtacggtattaatgctggcgactccggcgagtattgcgggctgtaaaaaagtggtgctgtgcagtccgccgccgattgccgatgagatcctttatgcggcgcagctgtgcggtgtgcaggacgtgtttaacgtcggcggcgcacaggccattgccgcactggcgtttggtacggaatctgtgccaaaagtggacaaaatcttcgggccgggtaacgcctttgtcaccgaagcgaaacgtcaggtgagccagcgtctggacggtgcggcgatcgatatgcccgcaggcccgagcgaagtgctggtgattgctgacagcggcgctacgccggatttcgtggcttctgatttgctctctcaggctgaacacggcccggacagtcaggtgattttactgacgcccgctgctgatatggcgcgtcgcgttgccgaggccgtcgaacgccaactggcagaactgccgcgtgccgaaaccgcccgccaggcactgaacgccagccgcctgatcgtgactaaagatttagcgcagtgcgtggagatctccaaccagtacggcccggagcacctgatcattcagacccgcaacgcccgtgaactggtcgatagcatcaccagcgccggtagcgtatttcttggtgactggagtccggaaagcgcaggtgattacgcctccggcaccaaccacgttctaccgacttacggttacaccgccacctgttccagcctcgggctggcagatttccagaagcgcatgaccgtacaggaactgagcaaagaggggttctccgcgctggctagtaccatagaaacactggccgccgccgagcgcctgaccgcccacaaaaatgccgttactttgcgtgttaacgcccttaaggagcaagcatgagcaccgtgactattaccgatttagcgcgtgaaaacgtccgcaacctgacgccgtatcagagcgcgcgtcgtctgggcggtaacggcgatgtctggctgaacgccaacgaataccccactgccgtggagtttcagcttactcagcaaacgctcaaccgctacccggaatgccagccgaaagcggtgattgaaaattacgcgcaatatgcaggcgtaaaaccggagcaggtgctggtcagccgtggcgcggacgaaggtattgaactgctgattcgcgctttttgcgaaccgggtaaagacgccatcctctactgcccgccaacgtacggcatgtacagcgtcagcgccgaaacgattggcgtcgagtgccgcacagtgccgacgctggacaactggcaactggacttacagggcatttccgacaagctggacggcgtaaaagtggtttatgtttgcagccccaataacccgaccgggcaactgatcaatccgcaggattttcgcaccctgctggagttaacccgcggtaaggcgattgtggttgccgatgaagcctatatcgagttttgcccgcaggcaagcctggctggctggctggcggaatatccgcacctggctattttacgcacactgagcaaagcttttgctctggcggggcttcgttgcggatttacgctggcaaacgaagaagtcatcaacctgctgatgaaagtgatcgccccctacccgctcagcacgccggttgccgacattgcggcccaggcgttaagcccacagggaatcgtcgccatgcgcgaacgggtagcgcaaattattgcagaacgcgaatacctgattgccgcactgaaagagatcccctgcgtagagcaggttttcgactctgaaaccaactacattctggcgcgctttaaagcctccagtgcggtgtttaaatctttgtgggatcagggcattatcttacgtgatcagaataaacaaccctctttaagcggctgcctgcgaattaccgtcggaacccgtgaagaaagccagcgcgtcattgacgccttacgtgcggagcaagtttgatgagtcagaagtatctttttatcgatcgcgatggaaccctgattagcgaaccgccgagtgattttcaggtggaccgttttgataaactcgcctttgaaccgggcgtgatcccggaactgctgaagctgcaaaaagcgggctacaagctggtgatgatcactaatcaggatggtcttggaacacaaagtttcccacaggcggatttcgatggcccgcacaacctgatgatgcagatcttcaccagccaaggcgtacagtttgatgaagtgctgatttgtccgcacctgcccgccgatgagtgcgactgccgtaagccgaaagtaaaactggtggaacgttatctggctgagcaagcgatggatcgcgctaacagttatgtgattggcgatcgcgcgaccgacattcaactggcggaaaacatgggcattactggtttacgctacgaccgcgaaaccctgaactggccaatgattggcgagcaactcaccagacgtgaccgttacgctcacgtagtgcgtaataccaaagagacgcagattgacgttcaggtgtggctggatcgtgaaggtggcagcaagattaacaccggcgttggcttctttgatcatatgctggatcagatcgctacccacggcggtttccgcatggaaatcaacgtcaaaggcgacctctatatcgacgatcaccacaccgtcgaagataccggcctggcgctgggcgaagcgctaaaaatcgccctcggagacaaacgcggtatttgccgctttggttttgtgctaccgatggacgaatgccttgcccgctgcgcgctggatatctctggtcgcccgcacctggaatataaagccgagtttacctaccagcgcgtgggcgatctcagcaccgaaatgatcgagcacttcttccgtagcctcagttacaccatgggcgtgacgctacacctgaaaaccaaaggtaaaaacgatcatcaccgtgtagagagtctgttcaaagcctttggtcgcaccctgcgccaggccatccgcgtggaaggcgataccctgcccagcagcaaaggagtgctgtaatgaacgtggtgatccttgataccggctgcgccaacctgaacagcgtgaagtctgccattgcgcgtcacggttatgaacccaaagtcagccgtgacccggacgtcgtgttgctggccgataaactgtttttacccggcgttggcactgcgcaagcggcgatggatcaggtacgtgagcgcgagctgtttgatctcatcaaagcctgtacccaaccggtgctgggcatctgcttagggatgcaactgctggggcggcgcagcgaagagagcaacggcgtcgacttgctgggcatcatcgacgaagacgtgccgaaaatgaccgactttggtctgccactgccacatatgggctggaaccgcgtttacccgcaggcaggcaaccgcctgtttcaggggattgaagacggcgcgtacttttactttgttcacagctacgcaatgccggtcaatccgtggaccatcgcccagtgtaattacggcgaaccgttcaccgcggcggtacaaaaagataacttctacggcgtgcagttccacccggagcgttctggtgccgctggtgctaagttgctgaaaaacttcctggagatgtgatgattattccggcattagatttaatcgacggcactgtggtgcgtctccatcagggcgattacggcaaacagcgcgattacggtaacgacccgctgccgcgattgcaggattacgccgcgcagggtgccgaagtgctgcacctggtggatctgaccggggcaaaagatccggctaaacgtcaaatcccgctgattaaaaccctggtcgcgggcgttaacgttccggtgcaggttggcggcggcgtgcgtagcgaagaagatgtggcggcgttactggaagcgggcgttgcgcgcgtagtggtcggctccaccgcggtgaaaagtcaagatatggtgaaaggctggtttgaacgcttcggtgccgatgccttagtgctggcgctggatgtccgtattgacgagcaaggcaacaagcaggtggcagtcagcggctggcaagagaacagcggcgttagtctggaacaactggtggaaacctatctgcccgtcggcctgaaacatgtgctgtgtaccgatatcagccgcgacggcacgctggcaggctctaacgtctctttatatgaagaagtgtgcgccagatatccgcaggtggcatttcagtcctccggcggtattggcgacattgatgatgtggcggccctgcgtggcactggtgtgcgcggcgtaatagttggtcgggcattactggaaggtaaattcaccgtgaaggaggccatcgcatgctggcaaaacgcataatcccatgtctcgacgttcgtgatggtcaggtggtgaaaggcgtacagtttcgcaaccatgaaatcattggcgatatcgtgccgctggcaaaacgctacgctgaagaaggcgctgacgaactggtgttctacgatatcaccgcttccagcgatggccgtgtggtagataaaagctgggtatctcgcgtggcggaagtgatcgacattccgttttgtgtggcgggtgggattaagtctctggaagatgccgcgaaaattctttcctttggcgcggataaaatttccatcaactctcctgcgctggcagacccaacattaattactcgcctggccgatcgctttggcgtgcagtgtattgtggtcggtattgatacctggtacgacgccgaaaccggtaaatatcatgtgaatcaatataccggcgatgaaagccgcacccgcgtcactcaatgggaaacgctcgactgggtacaggaagtgcaaaaacgcggtgccggagaaatcgtcctcaatatgatgaatcaggacggcgtgcgtaacggttacgacctcgaacaactgaaaaaagtgcgtgaagtttgccacgtcccgctgattgcctccggtggcgcgggcaccatggaacacttcctcgaagccttccgcgatgccgacgttgacggcgcgctggcagcttccgtattccacaaacaaataatcaatattggtgaattaaaagcgtacctggcaacacagggcgtggagatcaggatatgttaacagaacaacaacgtcgcgaactggactgggaaaaaaccgacggacttatgccggtgattgtgcaacacgcggtatccggcgaagtgctaatgctgggctatatgaacccggaagccttagacaaaaccctcgaaagcggcaaagtcaccttcttcagccgcactaaacagcgactgtggaccaaaggcgaaacgagcggcaatttcctcaacgtagtgagtattgccccggactgcgacaacgacacgttactggtgctggcgaatcccatcggcccgacctgccacaaaggcaccagcagttgcttcggcgacaccgctcaccagtggctgttcctgtatcaactggaacaactgctcgccgagcgcaaatctgccgatccggaaacctcctacaccgccaaactgtatgccagcggcaccaaacgcattgcgcagaaagtgggtgaagaaggcgtggaaaccgcgctggcagcaacggtacatgaccgctttgagctgaccaacgaggcgtctgatttgatgtatcacctgctggtgttgttgcaggatcaggggctggatttaacgacggtaattgagaacctgcgtaaacggcatcagtgagttgcggggtaagcggatgcgatattgttgccgcatccggcaaaaaaacgggcaaggtgtcaccaccctgccctttttctttaaaaccgaaaagattacttcgcgttgtaattgcgtagagcattacgccccagcacaatccccgcgccaaccatgccacccagcagcaccgccagaatcaaggtaattgcctttttcgggctatcacgacgaataggtaacatcggtttcatcacataacggtaagcatgaatatcaagatcatcaacttttaagctttcgatatccagcaggttttgacgagtctgatagtagtttgggctgaacaccaacggacgggtcgcctcatgcttaatcatgctctccagcgcttcgctccccaaaaggaacaacgtatcttgtgtgatatcttcgccagtctgttgaatctgcggttttgtcacctgcgcctgattcgcatactgcaacgcttcctgaatctgacggatacgcagatctttctgctcctgcgcgactacttcctgcgttcttaaagagtcctgcaagtttttccgtcccagagcaatgttgtctttgagatccttttctagctcttgattcactttatcgtcaacttgctgaatgtattgggccaacttcatttgtgcgccctctgcagtttgcccaacataagaaacagtcaatggtaattgctggttcttaacagaaggttcgatggtaagtttttctcgttcttcctgattatccagcgtttctgctaatgcagagaaggcagaactgaagcgaccaattaacgtctcctgcaaatcgcttactttcggtgcagcctgaccatagataacattcatggcattgttatagccagcaatttgccccacgtcgggctgagtgataattgctgtactcgtccatttctccttcgctactgccaaatatccaatagccagggcaatagccacaatgacggaaatgatgattgtcatcttgccacgccacaactgcactagtaaatcaatcaaatcaatctgttccgggtcatggttttgcccagaaacattattattttctactctcatcattaccctaactgacggaaatttccaagtccgcatagtttagcgataatcctcgtgaatgctataggataagtgataaaaataatgaattgttgtgtaagtaacaaaagacaatcagggcgtaaatagccctgataacaagatgttagtcgctgccaaagagatcgcgggtgtataccttatctgccacatccttaagctcttctgccattcggttagagataatgacgtcggcttgttgtttgaaggtggcgagatcacgttccaggcgagagttgaagaaactgtcttctttcatcactggctcgtagatgatcacttcaacacctttcgccttgatacgtttcataatcccctgaatagaagacgcacggaagttatcactaccgctcttcataatcagacgataaatacccaccacttgcggcttgcgactcaaaatggcatcggcaataaaatctttacgcgtgcggttagcatcgacaattgcgctgatcaggttattcggcacagactggtagttcgccagtaactgcttggtatctttcggcagacaataaccaccataaccaaagctcggattgttgtaatggttgccaatacgtgggtcgagacaaacgccttcgattatttgacgggaattcagacctaaactttctgcatagctatccagttcgttaaagtacgccacgcgcatcgccaggtaggtgtttgcaaaaagtttaatcgcttctgcttcagtggagtcggtaaacagcatcgggatattttgcttaatcgcgccttcctgtaacagagcagcgaaacgttctgcgcgttcactacgctcaccgatgacaatacgactaggatggagattatcgtaaagggctttaccctcacggagaaattccggggagaatataatattttcagtgcgatatttcttatgcatcgctgcggtaaaaccaacgggaaccgtacttttgatgaccataaccgcataaggatttatctcaactacgtctttaattacactttctacactggatgtattgaaataattagttttaggatcatagtcggttggagtggcgatgatgacataatcagcatcccggtaggcttcatttttatctaatgtggcattaaagtgtattttatcactttgcaaaaactgctgaatttccttatcaacaataggagatatccgatcattcagcatagcaacgcgactcggtaaaatatctaatgccacaacctcatgattttgtgcgattagaagcccgttactcaagcctacatagccagtaccggaaatggtgattttcatttcatgctctcagaattaacttaactgtgaatcatgatgtttttagcatcctgataagagctaaaagttttaacgctacgttgttcgatggtcaacgcaacgaaaaacaattcagattttctttataagaatagctgatatttattaagttaatattaagcagtgaaatttagtctataagatatttggcaaaaaaaagcccggtgcaatatacgccgggcctcaattttattgttggttaaatcagattaatccagccattcggtatggaacacaccttctttatcaatacgcttataagtatgcgcaccaaaatagtcacgctgtgcctggatcaggttcgcaggcagaacagcagcacggtagctgtcgtaataggcaaccgctgcggagaaggtcggaaccggaataccgttctgtactgcataagcaacgacatcacgcagcgcctgctggtagtcatcggcaatttgcttgaagtacggagccagcaacaggttagcgatctgtggattttcggcataagcatcggtgattttctgcaggaactgcgcacggatgatgcagccagcacggaaaatcttcgcgatttcgccgtagttcagatcccagttgtactcttcagacgcagcacgcagctgagagaagccctgggcgtaagaaacgattttgcccagatacagcgcacgacgaactttttcgatgaactcagccttgtcgcctgctggctgtgcttgcggaccagagagaactttagatgcggcaacacgctgatctttcagagaagagatataacgtgcaaacacagactcggtaatcaggctcagcggttcgccgagatccagcgcgctctggctggtccatttaccggtacctttgttagccgcttcatccaggatcacatcaaccaggtagttaccgtcttcatcttttttggtgaagatatctttggtgatgtcgatcaggtaactgctcagttcaccgttattccactcggtaaaggtctgcgccagttcttcgttggtgaggttcaggccacctttaagcagagaataggcttcagcaatcagctgcatatcgccgtattcaataccgttgtgaaccatcttcacatagtgacctgcgccatcggcaccaatataggtaacgcatggttcaccgtcttcagctacggcggcgattttggtcaggatcggtgctaccaattcataggcttctttctggccaccaggcataatagaaggacctttcagcgccccctcttcaccgccagaaacaccggtaccgatgaagttaaagccctctgcactaagctcacgattacgacgaatagtgtcctggaagaaggtgttaccaccatcaatgatgatgtctcctttatcgagatatggtttgagggaatcaatagcagcatccgtgcctgcacctgctttcaccattaacaggatgcgacgaggcgtttccagagattcgacaaactctttcaccgtatagtaaggaaccagtttcttgcctggattttcggcaatcacttcttccgtcttctcacgggaacggttgaaaatagagacggtataaccacggctttcgatgttgagcgcaaggttgcgtcccatcactgccataccgactacgccgatctgttgcttggacattacatactcctgtcaggtgtgatcaccgcgctgaatgctcgcggcctggaatgttcgcaaataagtatacaaagtacttattaaagtataaatagcttatccatgcttatatgcttacggctttatatgtctccacatgcgatatttcttaaataatgttttattattaccacttttaattcagggataatgtgaggttattaccctcaaataatatgagataaatagtgctgcaacattgcatttttgccccgatttatccatgatcgaattgtgacatttgtcatacaacgaataggttttgtacttactatggaatggattgccgatccgtctatctgggccgggttaatcacgctgattgtgatcgaactggtcctcggcattgataacctggtctttattgccatcctcgccgaaaaactaccgccgaagcagcgtgaccgcgcacgggttaccgggctgctgctggcaatgttaatgcgcctgttactgctggcgagtatctcctggctggtcaccctgactcaaccgctgttcagcttccgcagctttacctttagcgcccgcgacttaatcatgctgtttggtggtttcttcctgttgttcaaagccacgatggagctgaacgaacggctggaagggaaagacagcaataatcccacacaacgcaaaggtgcgaagttctggggcgtggtgacgcaaattgtggtactggacgccattttcagtctcgacagtgtgattaccgccgtcgggatggtcgaccatttactggtcatgatggccgccgtggttatcgctatcagcctgatgttgatggccagcaagccgttaacgcaatttgttaacagtcacccgacgatcgttattctctgcttaagcttcctgttgatgattggctttagcctggtggcagaaggtttcggcttcgtcattccgaaaggctacctgtacgctgccattggtttcagcgtgatgatcgaggcgctcaatcagttggctatctttaaccggcgacgttttctttccgctaaccagacgctgcgccagcggactaccgaagcggtaatgcgcctgcttagcgggcaaaaagaagatgcggaactggacgccgaaaccgcgtccatgctggtggatcatggtaaccagcagatctttaatccgcaggaacggcggatgattgagcgggtacttaatcttaaccagcgtaccgtcagcagcattatgacgagccgccacgatattgagcatatcgatctcaacgcgccggaagaagaaatccgccagttgctggagcgaaatcagcatacgcggctggtggttaccgacggtgatgacgcagaagatttgctcggtgttgttcacgttatcgacctgctacaacagtctctgcgcggcgaaccgctcaacctgcgggtgttgattcgccagccgctggtgttcccggaaaccttgccgttgttacctgccctggagcagttccgtaatgcccgcacgcactttgcttttgtggtggatgagtttggcagcgtggaagggattgtgacattaagtgacgtcactgaaaccattgccggtaacttaccgaacgaagtggaagagatcgacgcccgccatgatattcagaagaatgcggacggttcctggacggcgaatggtcatatgccgctggaggatctggtgcaatatgtgccgctgccgctggatgaaaaacgtgaatatcacaccattgccgggctgttgatggagtatttgcagcgtattccaaaacctggcgaagaagttcaggtgggggattatttgcttaaaacgttgcaggtagaaagccatcgcgtgcagaaggtgcagattataccgctgcgtaaggatggcgagatggagtacgaggtgtgatggtatcggtcattttacccaatagccgaaaggaataagatgagggaaccgcgccatcggcgatttaccgccgggagcccgggttgccagggtggtggagattgagccaccctggcacgttcaccggcttgagcgttccatagtagcgaggaacatcaagtgaacggaacagccttcgatcttacatattcagaatataatgatgccgccacgaacgcctgatgcgacgctttacgcgtcttatcaggcctacaggactggtcacctggtaacttacatcttctccagcaacttcttcacatctttgccattacgggaatctttattccgctcggcccagtcattcaggcgacgtttcgcttcgtcctgtagatgtttgcgcagtaactgatccacttgcaggctgtaattgagttgctgccagttgccataaacccgcagcggtactggcgtttctttcaggaaatcaatcagtttgctttccccgttccagccacccacgacccgaatatcaaactgggtgtcgcaggtttgatctgccagattcaacatgccttcccctgtcagcgccagcacagggctttgaccttgcatgtcgtttaacgtcacgacgccatccttcaacgtcaaatcggtggtaaagcggtcaagccgcgtcacgttatcaaagttttcagcggccttcacatcaccgccattacgctctaccgcttgctgaatcatctgctggaagttcatcccttccatgcgcgtgtcggtcatttcgacatgtgcctgtccttgccagttgtggcggaatgcgtcggcatctatgtcagcaccggagaaatcaccagccagactcatttttccggtcaagctaatcggatagttaaacgccttcagaatggtaccaatctcaacgttttccagccgtggctggaagtttatccgcggatttatacttgtcgcgtccagcgtgcccggcagactaacctgtccaccgttaagtttgccctgcagttgagtaatttccagcaaaccgctcttgttggtcatttgcgtggcaacatctgtaaaattcattccgcgccagcgcacgttactggcctgcaacaaaatatcagccgtaaagccttgcagtccctgataggccggttcatcaatacggctagaaatgaccgggcgcggcaacgtactttggctctgcccctgctgcgcggcaccgttttcaccattcgcggtttcattaagcgggatgaggttgtcaagattcagttgcgggaattgcagcctcagctgccattccggtttctctgtcagcgtaacctgtgcttgcccgcttagcgtactatcattggcggtcaaactaatttggttaaaactaaggcgtttatgactctcctgccactgggcctggaaactcccctgcccctgaataccttgttttggtaaatcggcaccctgcaactgccagttaatttgttcaatagccgccgttaaatcatgcggataatcagaagcatctaccgtaccgttaagggatatcgtgagatcgcgctgatcgcgattaacccgcccggagaactcaaaactaccacgatgttggggatcttgttccatttgcaggcgaatattgcggattgtcacctgctcgtcatcttcatgctggaacaccagcacgctgtccgccaccttaagactggatatatcaaagctccatccgcgatcgtcactcagatccggcaaggtattgtcgcgcggtgcaaccggagcgtcttcactgcgcaccgcttccgtctgcggcgtcagttggatcactgccccttttagcatcacctgcttaacgctcagttgatgactcagtagtggtaaaagcgccacgtccagacgcatgttgtcggcgcgaaccagtggctggcttgcgccctgggcggtgagagacattcgcccggagaggatactaagctgcggccagacgtgccaacgcagtggcccgtcgagctgcaattgataaccgctacgtgcagcaacttgcttgaccatatagtcgcggaaatcattcggattcaccagcaacactaacgcagataacccggccaccagcacgaccaggagtatcatcagcgtcgtcagaaatcgtctcatggtatcctcaatgggcctgaattagtctttatcgattcggctggctaccgcgccctgctggttgcgatatttcgcatcttcacggcggttgtaaggtcgcaccgccgggccggaaagcggctcaaagctcagcgcaccaattaacatgcccggacgcagcgccagcggcagcttaccggagttgtagaactccagcacaatgcaaccagaccagcccggatcgatgcggtgcgcggtgacgtgcaccatcagccccagacgcgccagactggaacgcccgtccagccagcccaccagatcggctggcagcgtcacgctctccagcgtcaccgccagcgccagctctcctgggtgaagatagaacgcctcgccctcgtcgagaacgatctcatcgctcatcacgcggtcaagcgcggcgctcacttcatctttgggaccgctcagatcgataaacgctgccgtgtgaccacggaaggtacgaaatttattgcccaggcgtacatccaccgtcgcgccgttaatacgctccactggcggacgtgggttgatgctcaaacggccttcatcaagccaggcttcaatatctcggtcacacagacgcatggcattttctcctttcgcgcatcactcccttaacgccaattacgtcaagggcatactaggttatcactgaacggtacacaatttatcaagcttattcaaagaactgacttattttcgctttcaatatatcgatcgcgatgcggtttttcccgccgcgcggcacgataatgtccgcatattgtttagaaggctcaatgaattgcaggaacatcgggcgcacggttttttgatattgcgccatcacactatccatactacgcccacgctcgttaacgtcacgcttgatgcggcgcatcaggcagatatccagcggggtatcaacgaaaatggagaagttaagttcgtcacgcaaacgcgcatccgtcagcaacaaaatgccttcgagaatgatgaccttcttcggctcaaccgtcaccgtttctttcatacgcgtatgttcaacatagctgtaaaccggcaggtcaattgcgctgccgcgtttcaacgcttgtaaatgctcaagcagcagactgtgatccatcgcgctgggatggtcgtagttggtcttaacgcgttcttccatgctcagatggctttgatctttgtaatagcagtcttcgggaattacgccgatgtgttcatcaccgacttgctcacgcaattcacgataaagggtactggcaataagactcttgccggaagcgcttgcgccagcgataccgataatgacgcactgatgagactgatcagtcatatatttagcgacctgattaacctggatgttaggaagggggcgacgaagcgccaaacgcggcaattatagggatttcatccgtctgataccagtcgaatagcgttgccgcgcgctcagagttaattgttgacaaagaattcccgggggcaaattacgttgatcagttttatgtaaggtaaaaaatgttaaacgcagttgcgcaaattatccgcctttacgtcactttatgagcaattcgcatataaaatgtaaaacttttgtactagcataaacacagaaacgaatactggcgaccaggtcttgcggataaagcggtaatgagcaaacaaagtcagcatgtattaattgccctgccccacccgctgcttcacctggtcagtttaggtttagtcagctttatctttacccttttcagccttgagcttagccagtttggcacccaactcgccccactgtggttcccgacgtccatcatgatggtggcgttttatcgccatgccgggcgcatgtggccgggaattgcgctgagctgtagcctgggaaatatcgccgcatccatcctgcttttttccaccagcagcctgaacatgacctggacgaccatcaatattgttgaagccgtggtcggggcagtgctgctacgtaaattgctgccgtggtataaccccttgcaaaatctggctgactggctgcgtctggcactcggcagcgccattgttccgcctctgttggggggtgttctggttgtcctgctgacgcccggagacgatcctctcagggcatttttgatatgggtactgagtgaatccatcggcgctctggcactggtgccgctgggattgttatttaaaccacactatctgctgcgccatcgcaacccacggttgctttttgagagcctgctcacgttagccatcacactgacgttaagctggcttagcatgctgtatctgccgtggccttttactttcattattgtgctgttgatgtggagcgccgtgcgtctgccacgaatggaagcctttttgatcttccttaccacggtgatgatggtgagcctgatgatggccgcggatccccccctgcttgctacgccgcgtacgtacctgatgagccatatgccgtggctaccgtttttgctgatcctgctgcccgccaacatcatgaccatggtgatgtatgcctttcgtgcggaacgcaaacacatttccgaaagcgaaacccactttcggaacgcgatggaatattccgctatcggtatggcgttagtgggcaccgagggacaatggctgcaaaccaacaaagcgctctgccagtttctcgggtacagtcaggaagagctgcgcggactcacctttcagcaactgacctggccggaggatctcaataaagatctccaacaggttgaaaagctgataagcggtgaaataaacacctatagtatggaaaaacgctactacaaccgcaatggcgatgttgtctgggcgttgcttgccgtcagtctggtgcgccacacggatggcacgccgctctattttatcgctcagattgaagacattaacgagctaaaacgcaccgaacaggtcaatcagcaactgatggagcgcatcactctggctaacgaagcgggcgggattggcatctgggagtgggagttgaagccgaatatttttagctgggataagcggatgttcgagctgtatgaaattcctccacatatcaaaccgaactggcaggtgtggtacgagtgcgtgctgccggaagatcgccagcatgccgaaaaagtgattcgtgatagcttgcaaagtcgcagcccctttaaactggaatttcgcattaccgtaaaagacggtattcgccatatccgcgccctcgccaaccgggtactgaataaagaaggcgaagtcgaacgtctcctcggcatcaatatggatatgaccgaagtgaaacagcttaacgaggcattgtttcaggaaaaagagcgcctgcacattacgcttgattccatcggtgaagccgtggtctgtattgatatggcgatgaaaattacctttatgaatccagtggcggagaagatgagcggctggacgcaggaagaagcgttaggtgttccgctcctgacggtgttgcatattacttttggcgacaacggaccattaatggagaacatttacagtgccgacaccagtcgttccgcgatcgagcaagatgtggtgttgcactgtcggagcggcggcagttacgacgtgcattacagtattacgccgttaagtactctggacggcagcaatattggtagcgttctggtgattcaggacgttaccgaaagtcgcaaaatgctgcgccagctgagctacagcgcctcccatgatgcactgacgcatctcgccaaccgcgccagttttgagaaacaactgcgtatcctgctgcaaacggtaaacagtacacatcagcgacatgccctggtgtttatcgatcttgatcgctttaaagcggtgaatgacagcgccgggcatgcggcgggtgacgctttgctgcgcgaactggcgagcttaatgctgagtatgctgcgttccagcgacgtgctggcgcgactcggtggggatgaatttggtctgctgctaccagactgtaatgttgaaagcgcgcgttttatcgctacacgcattatcagtgccgtgaatgactatcactttatatgggaaggccgtgtgcatcgggtaggtgccagtgccgggattaccttgattgatgacaacaatcatcaggcggcagaagtgatgagccaggctgatatcgcctgttatgcctccaaaaatggtggccggggccgggtgacggtttacgaaccgcagcaagctgccgcacatagcgaacgggcggcgatgagccttgatgaacagtggcggatgattaaagagaatcagttgatgatgctcgcccacggtgtcgctagcccacggatcccggaagcgcgtaatttgtggctgattagtcttaagctctggagttgcgaaggcgagattattgatgaacaaacatttcgtcgtagcttcagcgatccggcgcttagccatgctcttgaccgccgggtattccacgaatttttccagcaggccgcaaaagcggttgccagtaaaggcataagcatctccctccccctttccgttgccggtttgagtagcgccacgctggtgaatgatctgcttgagcagctggaaaatagccctctaccaccacggttattacatctgattattccggctgaagcgattttagatcacgcagaaagcgtgcaaaaactgcggctggcgggatgtcggatagtgctcagccaggtgggccgcgatctgcaaatcttcaacagcctgaaagcgaatatggcagattacctgctacttgatggtgagttatgcgccaacgtgcagggtaatttgatggatgagatgctgattacgattattcaggggcacgctcagcgactcgggatgaaaaccatcgccgggccagtcgttttacccttagtgatggatacgctttctggcatcggcgtcgatctgatttatggtgaggtgattgccgatgcccaaccgctggatttgctggtgaatagtagttatttcgcgattaactgaggcgtgcttccccatcgcctgatgcgacgctaacgcgtcttatcatgcctacaaatcgctcattccccaggccggataaggcgctcgcaccgcatccggcgaccaacgtcatgcttcgtctggttgccagccttccgtataccagatatgcaacagcgcataagaacgccagggcttccagcgctcggcataacggcggatttgcgccggtgtcattcccggaaatcgctgtttaatcagataatcatccggcaggaaaacatctttcgcctgccagccacgcaaagcaaaataattcgccgtccagcgcccgatacccggaaaagtttgcagcgttttcatcgcctgctccacatcgcccggtattgtcattggtaaggtgccctccagcgccgcatttgccagatgaatcagcgcctctgcccgtttcaacggcatacctaacgcttttaatgcctgcgggtctgctgctgccagccgctgaggcgtcgggaagcagatatactccggaaaatcatccagccgttcgccataaagctgtgccactctggcggtcaattttgccgccatcgccacgctcaccagttggcctaaaatcgcccgcacgccctgctcaaaagcatcaacacagccgggtaaacgcaatccgggccgcgccgcgcctaacctgcccaacgcaccgttaacaatttgtgggttacattgcagatcaaacaggcggctcattttcgccagacactctgcggcaacaggttctaaacctgcacttaaatttatgtgcagagtatggcgggctatatccggaatagcagtcaccacgccgcgatattcgcccaccgccagactacgggcataataactgtccgcgaccgtttccacactgctcaccgcacgggcggcgagaaatcccaacatccagctccagtcatacggcggctgccagttcagggtatacatcgcatctccttattcatccgctttcagcataaacgttattcagacgctgcgctttgctttcatattccggttgtcgcgacggcaacatttcgctaaagtcacgccccttcttcaccggcatggggattatttcgtgtttattggttttgattacggtacagcaaactgtagtgtggcggtcatgcgtgacggtaaaccgcatttgctaaaaatggaaaacgacagcacgctgctgcctagtatgctttgcgcgccaacgcgtgaagcggtaagcgaatggctgtaccgccatcatgatgttccggcagacgacgatgaaacgcaggcgctgttacgtcgggcgattcgttataaccgcgaagaagatatcgatgttacggcgaaaagcgtgcagttcggtctttccagtctggcacagtacattgatgatccagaagaagtgtggtttgtgaaaagtccaaaaagcttcctcggtgccagcggcttaaaaccgcagcaggtagcgctgtttgaggatctggtctgcgcaatgatgttgcacattcgccagcaggcgcaggcacagctgccagaagcgattactcaggcggtgattggtcgtccgatcaacttccaggggctgggcggtgatgaagcaaacacccaggcgcaagggattctggaacgcgcggcgaagcgtgccggattcagggacgtggtattccagtacgagccggtcgcggctgggctggattacgaagccaccttgcaggaagaaaaacgggtgctggtggtggatatcggcggtggtacgactgactgtagtttgctgctgatggggccgcagtggcgtagccgtctcgatcgtgaagccagcctgctgggtcacagtggttgccgtattggcggtaacgatctggatatcgcgctggcgtttaaaaacctgatgccactgctgggtatgggtggcgaaaccgaaaaaggcatcgccctgccgatcctgccgtggtggaatgcggttgccatcaacgacgtacctgcgcagagtgatttctacagtagtgccaacggtcgtctgcttaacgatctggtacgcgatgcccgcgaaccggaaaaagtggccctgttacagaaagtctggcgtcagcgtttaagctatcgcctggtgcgtagcgcagaagagtgcaaaattgctcttagtagcgtagcggaaacccgcgccagtctgccgtttatcagcaatgaactggctacgctgattagccagcgagggctggaaagcgccctcagccagccactgacgcggattctggaacaggtgcaactggccctggataacgcccaggaaaaaccggacgttatctacctgaccggcggtagcgcccgttctccgctgattaaaaaagcgctggcagaacagttgccgggcattccgattgcaggcggcgatgactttggctccgtcaccgccgggctggcacgctgggcggaagtggtgtttcgttaattgaaaaatggctcagcagcggcttaaatctgcctgcgcctgagccagtttttctgctgcctgacgtaacggttccatcaacggcatggtccgtgctggagcatgaaggcggaatcgctgcaactctgtcgcgccgactgtcaacgcgctttccagccgatgtcgtttggcggtcattttcgccattaccgcttgtctgtctgctggcgttatcgcttcattcggcctgaacacaaaacggcgttcacagctcgctttccagtcgataaccgcctgggtcagatggtcgccaaaccctttcacttgcttaacgccacgacgggtaacatctgcggctgtttcaataccaaaagaccgtaacgccgctttacgcgcagggccaacgccgggaatagaggcaacatcaataaaaaatccctccagaaacttctgcttctgccgttcccttgcagtgtcatgaagtgctgccagagcgcgtttctcttcttccggtaacccgagaatttcgtccttcattttttcgagcatcgtccgtttggcgataaaaccttccaggccgcctacctgctggatctggcggactaaatggtcatagtccattttcgcacgattaaatgcctcacggcgttgctgaacttctgctttgtacgctttgcttgtcagactgccaataatccagatagccgccagcacaggaaccaaaataatataacgcggttctgcctgaaggccgcaaagcagcaggcttaatgcactcagtgcgatctcaagcagaatgatgtattcgcgccgtaacaggcctaaaggaagcggcctgccagtcggttggaaatgatcgggtaatggcagttgcaatgctggcggtgctacactcgccatcaccatcgcccagactttcgccagcacaaaattcccgccggtggtaatgacctcttcgccgagatcaataaaatagataacaccttgattatccagcgcacaccacgggcagtcagtcaaatgagcggggtaaacatgcattgcactaacgatacatttctttaactgttggcgtagagagtccagtgccgctacccacgctttagccgtcggacgcccggttgccacgccactttccgtgaatgcctgctgaaacatggcttcaacatcactcggtaacatgcttagcggaatagatcgtggcggcggttttaaaccacgtcgctgattatcactcgcgtaggcataacggaaatgggtaatatccgtctccagcgcattacccgcatcagagataagcggcacaccagaataaggatgccgcccaccaaacaagacgtgaaaaattagcaacgcaaggccaaaattatcgtgattttctgtgcgttcaaaaccgacaaaacttggcaaggtttgtagctctggcggcgtaaaatggctcacgccgacttcgcataaatgcagtgtgccattggcgttaatttgaaaggagtcgctatcaatcagtaccactttgctgtcgcgacctaccataaaactgttctggtttacgtcacccacgacgtgcccgtgctcgtgaaccgtagcaaaagaactagcaatattgcgcgcaacatagagtagaaaatcccacgcacaatgagggtaactctggcgacgatgtgccgggctatagatcatatgaatcggttctttaccagaaacttttggcatcataaaaccgataacttttccgcctcgtccaccgtgaagcgttgcctgcggccaggcgacataattcaacaactgcgcgtcagctgtcgcagccataaaggcaagtttgtcctgttttaaggcgggtggcggcgtgtgataaatcttggcgacgctatcgacaaactcctcgatatcataaaccgcgccttcaccacctttgcccagttcacggccaagagtggtcaattcacctgtgcttgtaaatacttttatatttgttttcataatatttcgcgggtagttatattatatttcaatgaataataacaactaaccattaaaattatttctatatggggaaaacccactcaagaataaaaatgataatgcaattttatcaggatacaattcaatttcggcctgataatgattaacttccacaggtttttgctaactttgactacaaagggattctggagaaaaaatgaaaaagatattacttatgttgagtctgctattttttactaccgcgggctttagtgaagttagcgatacgttagtgacgggaggttatgataaacaagcgatgtctgacgcgattaaacatgcgcggaaagaaaccgataaattcatcgaggttatgaataaaaaagatgccgatactttcgcagtcaaagccccgataaccgatcacggaagaaccgagcatttctggcttacggatgtcacttattctaacggcatgtttattggcgtaatcagcaatgaccctggtattgttacaaacgtagaatatggccaggagtggaaaatcaagaaagaagatattagtgactggatgtatacgcgcggggataaaatttacggcggttataccattgatcctttattggtcacctatccaaaagaagaagccgacgagctaagagcaaaattagttcgctaatcagccgttatatttattgtttaaactggcggttgaattgttgtcttcaaccgccatgagaaactcactctgcccacagcgccagtgccaacgttttatcatcatccgtacgctcgtttaccgccgggctggacaaaaactgctttaacaattcaggtaataaatcgagttgttcctgcgttgctgccgccagtccattgaaaaacggggtaaagaaaggcacatgaggagaattatccagcatatttaacgccagtcgctggataccatccgtaaatgctgcaactttgtgcgcacgcccagtgctggtgagagtttccagtctggaaacggcatcttcgtcggtaatgaagtgcgtcatgttggcatattcacccgccatcggcgtgagaggcaattgcagaccgtgacccaaatctaccaccacgccgccatcgccaatctgcataatcaaggtgccgtcagggctactaatcagtcccagaaatgtgcaggcaaaatcgcgaaccgctaattctttggcttccgcctcggcaaaaagtcgttgacgaatggtcagtaccatatttgtggcgaggacatcattaagccccaattccccgccctgcactttttggctcatataagccatcgcttcattgacggcgagcatcgcgccttcgccaccctggctgacactgcctgcgccatcagcgacaaatacgctcaataatggctgctggtcatttaaccaggcaatctgcatctggcaggcatcctgacaaggcaagtccgcgctgatgtggctcgttccaacggtacttgcatagaccagacgccagctcacacactcgtccagccttttggcgcttccagcacaacttccgttcccggcgtggagcgggaaacgctacgcaggctactggataaccagctaaacagttcacggaattgtaatccttgcagaggcaaaggctgacgaacgctaatttgtgccagcgtcttcatatccgccccctgaacaccgatggaaaagaaagcaaaccttttatcttcttccccccgaaacactttgttggctgcagcctgccactcatcggttggtgcaccatcggtaatcaggaaaatccacgggcgataatagctaataccatttgcacgatactcacgtttccgctcctctaccatatccagggctttggtaatggccgcacccattggtgtatcgccctgggcaaacaggatgggcggaaaaaaattagcggcgctggtaaagggttgttccacatgcaccgggccgaacgtcacaatgccgagttccactctttttaaagccagcggatcagcaagcagttcatcacgaaaggtaaccaatccggcgttaagttcattaataggtctaccgttcatagaaccagaaacatccagcagcaaaatgcaggggcaacgtggttccgggttactggcaaaatcgctggtggcaaacgtgatttgttcgctcataagaaatcctttcttagagaattatcgaggtccggtatcataccgactgcaataatgaaataagagcaaacgaagaaactttcagaattaggcccggcggcgcagaaaattttgctattcgcctcgcaagaacggagagccgtcgattgacactaagggcggagtgacataatttcaggagtgagggttagggagaggtttccccctccccctggtgttcttagtaagcctggaagctaatcactaagagtatcaccagtatgatgacgtgcttcatcataaccctttccttattaaaagccctcttctccgggagaggctttcccgtttcagcgtcccgctgaaatcatcggcttacctcctttcgccctgaatgcagtctatcgctaacgcgtgaataaaatagtttcctctgtgattattgcgtaacgactcgcaaagaatatttgctggcaggatcgcagactacaaagcctgcggattgacaatcttatcgtgaagacatactttcaggagtgagggtagagcggggtttcccccgccctggtagtcttagtaagcggggaagcttatgactaagagcaccacgatgatgagtagcttcatcatgaccctttccttatttatggccccttcctcgggaggggctttcccgtttcagcgtcccgctgaaatcgtcggcttacctcctttcgccatgcaagcagtctatcgctaacgcgtagataaaatagtttcctgtgttattactggatgcgtgctcgcaaatgtgcccgtcattcagacgattccagacagtgtttcataattcctccatttttctcccttattggctggctacactagtatcattccgcgaaacgtttcaggaagagaaactcttaacgatgaaaggtagttataaatcccgttgggtaatcgtaatcgtggtggttatcgccgccatcgccgcattctggttctggcaaggccgcaatgactcccggagtgcagccccaggggcgacgaaacaagcgcagcaaagcccagcgggtggtcgacgtggtatgcgttccggcccattagccccggttcaggcggcgaccgccgtagaacaggcagttccgcgttacctcaccgggcttggcaccattaccgccgctaataccgttacggtgcgcagccgcgtggacggccaactgatagcgttacatttccaggaaggccagcaggtcaaagcaggcgatttactggcagaaattgaccccagccagttcaaagttgcattagcacaagcccagggccaactggcaaaagataaagccacgcttgccaacgcccgccgtgacctggcgcgttatcaacaactggcaaaaaccaatctcgtttcccgccaggagctggatgcccaacaggcgctggtcagtgaaaccgaaggcaccattaaggctgatgaagcaagcgttgccagcgcgcagctgcaactcgactggagccggattaccgcaccagtcgatggtcgcgttggtctcaagcaggttgatgttggtaaccaaatctccagtggtgataccaccgggatcgtggtgatcacccagacgcatcctatcgatttagtctttaccctgccggaaagcgatatcgctaccgtagtgcaggcgcagaaagccggaaaaccgctggtggtagaagcctgggatcgcaccaacagcaagaaattaagtgaaggcacgctgttaagtctagataaccaaatcgatgccactaccggtacgattaaagtgaaagcacgctttaataatcaggatgatgcgctgtttcccaatcagtttgttaacgcgcgcatgttagtcgacaccgaacaaaacgccgtagtgatcccaacagccgccctgcaaatgggcaatgaaggccattttgtctgggtgctgaatagcgaaaacaaggtcagcaaacatctggtgacgccgggcattcaggacagtcagaaagtggtgatccgtgcaggtatttctgcgggcgatcgcgtggtgacagacggcattgatcgcctgaccgaaggggcgaaagtggaagtggtggaagcccagagcgccactactccggaagagaaagccaccagccgcgaatacgcgaaaaaaggagcacgctcctgatgcaggtgttacccccgagcagcacaggcggcccgagccgcctgtttattatgcgtcctgtggccaccacgctgctgatggtggcgatcttactcgccgggattatcggttatcgcgccctgcccgttagcgcgctgccggaagtggactatccgaccattcaggtggtcacgctctacccaggtgccagcccggatgtcatgacctctgccgttaccgcgccgctagaacgccagttcgggcagatgtctggcctgaaacagatgagcagccaaagttccggcggtgcgagtgttatcactttgcagttccagctaacattaccgctcgatgtcgccgagcaggaagtgcaggccgcgattaacgctgcgaccaacttgttgccgagcgatctgcctaacccgccggtttacagcaaagtgaacccggcagatccgccgatcatgacgctcgccgtcaccagtaccgccatgccgatgacgcaagtggaagatatggtggaaacccgcgtcgcgcagaaaatcagccagatttccggcgtcggcctggtgacgctttccggcggtcagcgtccggctgttcgcgtcaaacttaacgctcaggcgattgccgccctcggcctgaccagcgaaaccgtgcgcaccgccattaccggcgctaacgttaacagcgcaaaaggtagcctcgacggcccttcccgtgcggtcacgctttccgcgaacgaccagatgcaatccgccgaagagtatcgccagctaatcatcgcctaccagaacggcgcgccaattcgtctgggcgatgtcgcaactgtagagcaaggtgcagaaaacagctggctcggcgcgtgggcgaacaaagaacaggccattgtgatgaatgttcagcgccagcccggtgctaacattatctccaccgccgacagcattcggcagatgctgccacagctcactgagagtctgccgaaaagcgtgaaggtgacagtgctttccgatcgcaccaccaatatccgcgcatccgtcgatgatactcagtttgaattgatgatggctatcgcgctggtagtcatgattatctacctgtttttgcgcaatattccggcgaccatcattcccggtgttgctgtaccgctgagcttaatcggcactttcgcggttatggtgtttctcgattttagtatcaataacctgacactgatggcgttaactatcgccaccggattcgtggtcgatgacgccatcgtggtgatcgaaaacatttcccgctatatcgaaaaaggcgaaaaaccgttggcggcggcgctcaagggcgcaggtgaaatcggctttaccattatcagcctgaccttcagtctgattgcggtgttgatcccactgctgtttatgggcgatatcgtcgggcgactgttccgcgaatttgctattaccctggcggtagcgattttgatcagtgcggtggtgagcctgaccctgacaccgatgatgtgcgcgcggatgctcagccaggagagcttgcgtaaacagaaccgcttctcccgtgccagcgaaaaaatgttcgacaggataatcgccgcctatggtcgtggactggcgaaagtgctgaatcatccgtggctgaccttaagcgtggcactcagcacgctgctgcttagcgtgctgctgtgggtgttcattccgaaaggtttcttcccggtacaggacaatggcattattcagggcactttgcaggcaccgcaatccagctcctttgccaatatggcccagcgacaacgccaggtcgcggacgtgattttgcaggatccggcagtgcaaagcctgaccagttttgttggcgttgatggcactaacccgagcctgaacagtgcacgtttacaaatcaacctcaaaccgttggatgaacgtgatgatcgggtgcaaaaagtcatcgcccgtctgcaaacggcggtagataaagtgccgggcgtcgatctcttcctgcaaccaacgcaggatctgactattgatactcaggtcagccgcacccagtaccagtttaccttgcaggccacgagtctggatgcgctcagtacctgggtgccacagttgatggaaaaactccagcaactgccacagctttctgatgtctccagcgactggcaggacaaagggctggtggcgtatgtcaatgttgatcgcgacagcgccagccgtctggggatcagcatggcggatgtcgataacgccctgtacaacgcgtttggtcagcggctgatttccactatttatactcaggccaaccagtatcgcgtggtgctggagcacaacaccgaaaataccccaggcctcgcggcgctggataccattcgcctgaccagcagcgacggcggcgtggtgccgctaagcagtattgccaaaattgagcagcgttttgcgccgctctccatcaaccatctggatcagttcccggtaacgaccatctcctttaacgtgccggataactatagcctgggcgatgcggtgcaggcgattatggacaccgaaaagacgctgaatctgccggtggatatcaccacgcagttccagggcagcaccctcgccttccagagcgcgctgggcagcactgtctggctgattgtcgcggcggtggtggcgatgtatatcgtgctcggcattctgtacgagagctttattcacccgatcaccattctcagcacgctacccaccgcaggggttggcgcactgctggcgttgctgattgctggtagcgaactggatgtgattgcgattatcggcattattttgctgatcggtatcgtgaagaagaacgccatcatgatgatcgacttcgcgctggctgctgagcgcgagcaaggcatgagcccgcgcgaggcaatctaccaggcttgtctgttgcgttttcgtccgatcctgatgaccactctggcggctctgcttggcgcgctgccgctgatgttgagtaccggggtcggcgcggaactgcgtcgtccgttaggtatcggcatggtcggcggtctgattgtcagccaggtgctgacgctgtttaccacgccggtgatttatttgctgttcgaccgcctggcattgtggaccaaaagccgctttgcccgtcatgaagaggaggcgtaagtgaagttttttgccctcttcatttaccgcccggtggcgacgattttactgagcgttgccattaccctgtgcggcatactgggcttccgtatgctgccggtcgccccgctgccgcaggtcgattttccggtgattatcgtcagcgccagcctgcccggtgcgagtccagaaacaatggcgtcttccgttgccacgccgctggagcgcagtcttgggcgcattgccggagtcagtgaaatgacctccagcagtagcctcggcagcacgcgtattattttgcagtttgattttgaccgggatatcaacggcgcagcgcgtgatgtgcaggcggcgatcaacgctgcacaaagtttgctgcccagtgggatgcccagccgcccgacctatcgcaaagcgaacccgagcgatgcgccaattatgatcctcacgctgacgtccgatacttatagccagggtgaactgtacgatttcgccagcacgcagctggctccgacgattagccaaatcgacggtgttggtgatgtcgatgtcggaggcagcagtctgcccgccgtacgcgtcgggctgaatccgcaggcgctgtttaatcagggcgtgagcctggacgacgtacgcaccgccgtcagcaatgccaacgtgcgtaaaccgcagggcgcgctggaagatggcactcaccgctggcagatccagaccaatgatgagctaaaaaccgccgctgaatatcagccgttgattattcactacaacaacggcggcgcggttcgtctgggcgatgtggcgacggtgaccgacagtgtgcaggatgtgcgcaacgccgggatgaccaacgccaaaccggctattttactgatgatccgcaaactgccggaagccaatattatccagacggttgacagcatccgggcaaaattaccggagttgcaggaaaccattccggcggcgattgatctgcaaattgcccaggatcgctcccccaccattcgcgccagcctggaagaagtcgagcaaacgctgattatcagcgtggcgctggtgattctggtggtgtttttattcctgcgcagcggtcgcgccactattattcccgccgttagcgtgccggttagcctgattggtacgtttgcggcgatgtacctgtgcggattcagtctcaataaccttagcttaatggcgctcaccatcgctactggtttcgtggtggatgacgccatcgtggtgctggaaaacattgcacgtcatctggaagcgggaatgaaaccgttgcaagccgcactgcaaggtactcgcgaagtcggttttacggtgctgagcatgagtctgagtctggtggcggtgttcctgccgctgctgttgatgggcggattgccgggccgactgttacgcgaatttgccgtgacgctttctgtcgccattggtataagcttgctggtttctctgacattaacgccaatgatgtgtggctggatgctgaaagccagcaagccgcgcgagcaaaagcgactgcgtggttttggtcgcatgttggtagccctgcaacaaggctacggcaagagtctaaaatgggtgctcaatcatacccgtctggtgggcgtggtgctgcttggcaccattgcgctgaatatctggctgtatatcagcatcccgaaaaccttcttcccggagcaggacactggcgtgttgatgggcgggattcaggcggatcagagtattagctttcaggcgatgcgcggtaagttgcaggatttcatgaaaattatccgtgacgatccggcagtggataatgtcaccggctttacaggcggtagccgagtgaacagcgggatgatgtttatcaccctcaagccacgcgacgaacgcagcgaaacggcgcagcaaattatcgaccgtctgcgcgtaaaactggcgaaagaaccgggggcgaatctgttcctgatggcggtacaggatattcgcgttggtgggcgtcagagcaacgccagctaccagtacacgttgttatccgacgacctggcggcactgcgagaatgggagccgaaaatccgcaaaaaactggcgacgttgccggaactggcggacgtgaactccgatcagcaggataacggcgcggagatgaatctggtttacgaccgcgacaccatggcacggctgggaatcgacgtacaagccgccaacagtctgttaaataacgccttcggtcagcggcaaatcagcaccatttaccagccgatgaaccagtataaagtggtgatggaagtggatccgcgctatacccaggacatcagtgcgctggaaaaaatgttcgttatcaataacgaaggcaaagcgatcccgctgagctatttcgctaaatggcaaccggcgaatgccccactaagcgtgaatcatcagggattaagcgcggccagcaccattagctttaacctgccgaccggaaaaagcctcagcgacgccagtgcggcgatcgatcgcgcaatgacccagcttggtgtgcctagcacggtgcgcggcagttttgccggcacggcgcaggtgttccaggagacgatgaacagccaggtgatcctgattatcgccgccatcgccacggtgtatatcgtgctgggtatcctttacgagagttacgtacatccgctgacgattctctccaccctgcccagcgcgggcgttggagcgctgttggcgctggagctgttcaatgccccgttcagcctaatcgccctgatagggatcatgctattaatcggcatcgtgaagaaaaacgccattatgatggtcgattttgcgcttgaagcccaacggcacggtaacctgacgccgcaggaagctattttccaggcctgtctgctgcgttttcgcccgattatgatgactaccctggcggcgctgtttggtgcgctgccgctggtattgagcggcggcgacggcagcgagctgcggcaacccctggggatcaccattgtcggcggactggtaatgagccagctccttacgctgtataccacgccggtggtgtatctctttttcgaccgtctgcggctgcgttttagccgtaaacctaaacaaacggtaaccgagtaaatgacagatcttcccgacagcacccgttggcaattgtggattgtggctttcggcttctttatgcagagcctggacaccaccatcgtaaacaccgcccttcccagtatggcgcaaagcctcggggaaagtccgttgcatatgcacatggtcattgtctcttatgtgctgaccgtggcggtgatgctgcccgccagcggctggctggcggacaaagtcggcgtgcgcaatattttctttaccgccatcgtgctgtttactctcggtagtctgttttgcgcgctttccggcacgctgaacgaactgttgctggcacgcgcgttacagggcgttggcggcgcgatgatggtgccggtcggcagattgacggtgatgaaaatcgtaccgcgcgagcaatatatggcggcgatgacctttgtcacgttacccggtcaggtcggtccgctgctcggtccggcgctcggcggtctgctggtggagtacgcaagctggcactggatctttttgatcaacattccggtggggattatcggtgcgatcgccacattgctgttaatgccgaactacaccatgcagacgcggcgctttgatctctccggatttttattgctggcggttggcatggcggtattaaccctggcgctggacggcagtaaaggtacaggtttaagcccgctgacgattgcaggcctggtcgcagttggcgtggtggcactggtgctttatctgctgcacgccagaaataacaaccgtgccctgttcagtctgaaactgttccgtactcgtacctttagcctgggcctggcggggagctttgccggacgtattggcagtggcatgttgccctttatgacaccggttttcctgcaaattggcctcggtttcagcccgtttcatgccggactgatgatgatcccgatggtgcttggcagcatgggaatgaagcgaattgtggtacaggtggtgaatcgctttggttatcgtcgggtactggtagcgaccacgctgggtctgagcctggtcaccctgttgtttatgactaccgccctgctgggctggtactacgttttgccgttcgtcctgtttttacaagggatggtcaacagcacgcgtttctcctccatgaacaccctgacgctgaaagatctcccggacaatctggcgagcagcggcaacagcctgctgagcatgattatgcaattgagcatgagtatcggcgtcactatcgccgggctgttgctgggactttttggtagtcagcatgtcagcgtcgacagcggcaccacacaaaccgtctttatgtacacctggcttagcatggcgttgatcatcgcccttccggcgttcatctttgccagagtgccgaacgatacgcatcaaaatgtagctattagccggcgaaaaaggagcgcgcaatgaagttctggcgacccggtattaccggcaaactgtttctggcgattttcgccacctgcattgtcttgctgatcagtatgcactgggcggtgcgtatcagttttgagcgtggctttattgattacatcaagcatggtaatgaacagcgattacaactgttaagtgatgcgcttggcgagcagtatgcgcagcatggcaactggcgcttcctgcgcaacaatgatcgctttgtctttcagatcctgcgtagttttgaacacgataatagcgaagataaacccggcccgggtatgccaccgcacggctggcgtacccagttctgggtggttgatcaaaacaacaaagtgctggttggtccgcgagcgccgattccacctgacggtacacggcgacccattctggtcaacggtgcggaagttggcgcggtgatcgcctcccccgttgagcggttaacgcgcaatactgatatcaatttcgataaacaacagcggcaaaccagctggttgattgtcgccctggcaacgttactcgcggcacttgccacttttctgctggcgcgcggtttactggcaccggtaaaacgacttgtcgatggcacgcacaaactggcggcgggcgatttcactacccgcgtaacgcccaccagtgaagatgaactgggcaaactggcgcaagacttcaaccagcttgccagcacactggagaaaaaccagcaaatgcggcgcgattttatggccgatatttctcacgaactgcgtacgccattagcggtgctgcgcggtgaactggaagccattcaggatggcgtgcgtaaattcacgccggagacggtggcgtctttacaggcggaggtcggtacactgaccaaactggttgacgatctccatcagttgagcatgtctgatgaaggcgctctcgcctatcaaaaagcaccggtagatttgatcccactgctggaagtggcgggcggcgcatttcgcgaacgattcgccagtcgtggcctgaaactgcaattttccctgccagacagtattaccgtatttggcgatcgcgaccgtttaatgcagttattcaataacttactggaaaacagcctgcgctacactgacagcggcggcagcctgcaaatctctgccgggcagcgcgacaaaacggtgcgcctgacctttgccgacagtgcgccaggtgtcagtgacgatcagctacaaaaattgtttgaacgtttttatcgcaccgaaggttcccgcaaccgtgccagcggcggttccgggctggggctggcgatttgcctgaacattgttgaagcacataatggtcgcattattgctgcccatagcccttttggcggggtaagcattacagtagagttaccgctggaacgggatttacagagagaagtatgaccgagttaccaatcgacgaaaacacaccgcgtattttgatcgtggaagatgaaccgaagctggggcagttgctcattgattatctgcgtgctgcgagctatgcgccgacgcttatcagccacggcgatcaggtactgccgtatgtgcgccagacaccaccggatctgatcctgttagatctgatgctccctggcaccgatggcctgacgctgtgccgggaaattcgtcgtttttctgacattccgatcgtgatggtgacggcaaaaatcgaagagatcgatcgcctgctggggctggagattggcgcagatgattatatctgtaagccgtacagcccacgggaagtggtagcgcgcgtcaaaaccattttgcgccgttgcaaaccgcagcgcgagttgcagcaacaggatgctgaaagcccgttgattatcgacgaaggtcgttttcaggctagttggcgcggtaaaatgcttgacctgacgcctgcggaatttcgtctgctgaaaacgctctctcacgaaccaggaaaagtgttctcccgcgagcaattgctcaatcatctttatgacgactaccgcgtagtaaccgaccgcaccatcgacagccacattaaaaacctgcgccgcaagctggaatctctcgacgccgaacagagttttatccgcgccgtttatggcgtcggttaccgctgggaagccgacgcctgccgcatcgtttaattttagcgacattattttgttagccggagatggcgttcagaccagatccggcaacattatcccacgcatggtcagcaaactgacattatctctccgccctggcaggcatcagaaaatcgctcatactttaatcggtaaacagcacctttagaatcctgtcgtttgttttcgatttcaaaatataatgaaattatttgtttttaaatatcgagataacgatcacaaaaacgacaatatgaaaattattcgaggagtgaaaggcaaaaaaacggcctcccgatagggaagccgtagcaaagtgcgcgtgtttttatgccggatgcggtgtaaacatacgtggcagtgctatgtaggcatgataagacgcttcagcgtcgcatcaggcataggttgccggatgcagcgtaaacgccttatccgtcctacggggtggtgttgttcgtataaggcgtatcaggcgatagtaattttgctatcgagataaacgtcctgcacggcgttaatcagtttcacgccgtcagccatgcttttcttgaacgctttacgtccaagaatcagccccattccgcctgcgcgtttgttgataaccgcagtacgcactgcatcgctgaggtcagtttcaccgcccgcagcaccgccggagtttatcaacccagcccgacccatatagcagttagctaactgataacgcaccagatcaatcgggttttcgctggtcaatttgctgtaaacacgatcgtcggtgtaaccgtaattaattgctttatagccgccgttattttccgccattttttgtttgacgatatctgcaccgatggttgccgccagatggtttgcctgaccggtcaggtcggcggaaacatggtaatcaacgccatctttcttaaaggcggagttacgcaaataggcccacagcactgtcaccatacccagctcgtgcgcacgttcaaaagccgcagaaatttcttcaatctggcgacgactctcttcgctgccaaaatagatagtcgcaccaaccgcaaccgcgcccatgttgaacgcctgctccacgctggcatacagcgtttgatcgtaggtattcgggtaacttagcgtctcgttgtgattaagtttgacgaggaatggaatgcgatgcgcataacgccggcttacgctcgccagcacgccgtaagtactcgccacacagttacagcccgcttcgatcgccagttcaacaatgtttttcgggtcaaagtagagcgggttagcagcaaaactagctccggcagagtgctcaacgccctggtcaaccggcagaatagaaagatatcctgtgccagccagacgcccggtgttgtacaacgtctgcatattacgtaacaccgctggcgggcgattattgtcaatcattacgcggtctacgtagtcatgtccggggagataaagctggtcagaaggaattgtcatacaacggtgctgtaaaaggttgtcggcgtctttgccaagcaactgcgcaatatctgtcattactatgctcccgtaaattccgattggatatcggctatggattgtcctggcccgccttttgcgggcaatcataatcctggtcgttacgggcgagtttttccatcttttggatgttttttcagcgttttctgttggctcgattcatcagaaaaaatgttagcgcggtcaagttttcaccgcaaaggtatttaaaaggtattattaagtggtattgtcatcgcgtaccttacattacctgtcatgaaggaattaaaagatgaaaacaacagcaaagctgagcttcatgatgtttgttgaatggtttatctggggcgcgtggtttgtgccattgtggttgtggttaagtaaaagcggttttagtgccggagaaattggctggagctatgcctgtaccgccattgcggcgatcctgagcccaattctggttggctccatcactgaccgctttttcagcgcgcaaaaagtgctggcggtattgatgttcgcaggcgcgctgctgatgtatttcgctgcgcaacagaccacttttgccgggttcttcccgttactgctggcctacagcctaacctatatgccgaccattgcgctgactaacagcatcgcttttgccaacgtgccggatgttgagcgtgatttcccgcgcattcgtgtgatgggcactatcggctggattgcctccggtctggcatgtggtttcttgccgcaaatactggggtatgccgatatcagtccgactaacatcccgctgctgattaccgccggaagttctgctctgctcggtgtgtttgcgtttttcctgcccgacacgccaccaaaaagcaccggcaaaatggatattaaagtcatgctcggcctggatgcgctgatcctgctgcgcgataaaaacttcctcgtctttttcttctgtagtttcctgtttgcgatgccactagcgttctattacatctttgccaacggttatctgaccgaagttggcatgaaaaacgccaccggctggatgacgctcggccagttctctgaaatcttctttatgctggcattgccgtttttcactaaacgctttggtatcaaaaaggtattattgcttggtctggtcaccgctgcgatccgctatggcttctttatttacggtagtgcggatgaatatttcacctacgcgttactgttcctcggtattttgcttcacggcgtaagttacgatttttactacgttaccgcttacatctatgtcgataaaaaagcccccgtgcatatgcgtaccgctgcgcaggggctgatcacgctctgctgccagggcttcggcagtttgctcggctatcgtcttggcggtgtgatgatggaaaagatgttcgcttatcaggaaccggtaaacggactgactttcaactggtccgggatgtggactttcggcgcggtgatgattgccattatcgccgtgctgttcatgatttttttccgcgaatccgacaacgaaattacggctatcaaggtcgatgatcgcgatattgcgttgacacaaggggaagttaaatgaaaacagaacgtattctcggtgctctttatgggcaggcgttaggggatgcgatggggatgccctccgagctttggccacgcagccgcgttaaagcacactttggctggattgaccgttttcttcctggaccaaaggagaataacgcggcctgttattttaaccgcgccgaattcaccgacgataccagcatggcgctgtgtctggcggatgcgttactggaacgtgaaggcaagatcgatccggatctgattgggcgtaatattctcgactgggcgctgcgtttcgacgcctttaacaaaaacgtactaggtccgaccagcaagattgcgcttaacgccattcgcgacggtaaacccgttgctgaactggaaaacaacggcgtgaccaacggcgcagcgatgcgcgtcagcccattaggttgtttgcttccggcgcgtgatgttgattcctttattgatgatgtagcgctggcgtccagcccgacccataaatccgatctggcggttgcaggcgcggtagtcatcgcatgggcgatttctcgtgccattgacggagaaagctggagtgcgattgttgattccctgcctagtattgcgcgacatgcacagcaaaaacgcatcactacgttcagcgccagtctggcggcgcggctggagattgcgctgaaaattgtgcgcaatgccgacggcaccgaatccgccagcgaacagctttaccaggtcgttggcgcaggtaccagcactattgagtccgttccgtgcgccattgcgctggttgaactggcacaaaccgacccgaatcgctgcgccgtcctgtgcgctaaccttggcggcgacacagacaccatcggtgctatggcgacggcaatttgcggcgcgttgcatggcgttaacgctatcgatcctgcgttaaaggcggaactggatgcggtaaatcagcttgatttcaaccgctatgccacagcgctggcgaaatatcgtcaacaacgggaggcggtatgagcggcgctcgattacacacgctgctgcctgaattaaccacgcgtcagagcgtgatggtcgtcggcgcggcggtcattgacgtgatcgccgacgcttatgccctcccctggcgtgggtgcgatatcgaactgaaacagcagagcgttaacgttggcggctgcgcactgaatattgccgtggcgttaaagcgcctcggcatcgaagcgggtaatgccttgccgctcggtcagggcgtgtgggcggagatgattcgcaaccggatggcaaaagagggcttaatcagcctgatcgataacgccgaaggtgataacggctggtgtctggcgctggttgagccggatggcgaacgcacttttatgagtttcagcggtgttgaaaatcagtggaatcgccagtggctggcgcgattaaccgttgcgcctggcagcctgctctatttttccggttatcaactggccagcccctgcggcgaattgttagtggaatggctggaagagctgcaagacgtgacgccgtttatcgattttggcccacgtattggcgatatcccggatgcattactggcgcggatcatggcctgtcgacctttagtgagcctcaatcgtcaagaggctgagattgccgccgaacgttttgctttatccgcagagataacaacacttggcaagcaatggcaggagaaatttgccgcgccgttgatcgttcgtctcgataaagaaggcgcatggtatttcagcaacgacgcttctggctgcattccggcatttccaacgcaagttgtcgacaccattggggcgggcgacagtcatgccggtggcgtacttgccgggctggcctctggtctgccactggcggatgccgtattactgggcaatgcagtggcgagctgggttgtcgggcatcggggcggtgattgtgcgccaacgcgcgaggaactactcctcgcacacaaaaacgtataattactcctcgcacacaaaaacgtatagatcgctgcgacagtggctaatgctgtactcaataggccgttgctgttggtcaagcgccacttgcttgatcaccagcaccggtattttgctatctaactgaatatgactctgaaactcggcatccggcatccgggcgctaacgcgggaacgcgtacgttgtgggtaaatgtgctggctgcggaaatagtcataaagactaatcccgatggcatcaacatcatgaattaaatgcgccggaacccagctttcctcaatgcttaccgcttcttcatcgacatagcgaatacgcttaagcaaaaagacatcacttcctgcttcgaccgccagctgctgcgcgacttcttcgggacatttcacgacacgcttgttaacccatagcgtatcgggctttttcccgcgcaataccacctgctgagaaaaacctcgcgcttctttcaagctgtattcgaagatgttgttgatctgcgtgccgtaaccgcggctacgcgtcaccacaccctcttcttccagcgcctgcatcgccttgcgcaccgtaatgcggctaacgccggttaactgacttaaatcacgttcaccgggcaaaatattgccatgctccagcaccccgctgcgcacggcattttttaccgtttcggcaaacttaatataaagcggcgtgttatccgccgctaaaatacgctcgttcagttgggcaatcagctgggtatgcgcttgttccatttgtctttttcctgccggggagtctggtgggagtatatcactgcttcttatttaaggcgtttctttaatcccatcaacgaatgcctgcaactcctccaccgtgccattaaatacattaaaatccaccggaccattgatgccatctacctgtccacggtcggaatgctgccagaagcgccaggccattccgtcattgtccggacgacgttgatagtagtgagccacccaccacggatattcattgaaatagcccgccagattggtgtgataaaaaacggctccactgtaaataatcggctttttccccgtacttttttcgaccatttttagccactgacttacccgcttgcgtaattcttttgcgcttaattttccccgttcttctacgtccagcacggcagggaaatcgccttgactgaaatccaccgtttgcagaaataatctcgcctgaacactagcggatacgctcggggagaaataatgatacgccccacgcagcaggccattttcgcggcttagttgccagttacggctaaaataggggtccaccagcttttcgccttccgtcgccttaataaaagcaaactgtaagcggataccattgtcgcgcatttttgccacccgctgccagtcgatccgctcctgccagcggctaacatctattccgtgaatggtgtaactggcaggaatgcgaatagcgaaagatttaaccgggcgataaccgtagaagtggatgtagtctgtaatctgaactgctgtgctatagaaaaaattcaccgtctgacgcggataaattgcaacgatggaaattagcccaagagcgcataatagagaggtgagtttttttcgactggtaattcttagctgcattggtttcatccctgaatgtcagtgccaaaggctgacaataaccaaagcagctatagtacggtgctcaccaccaggcgtggaagtggtgaaccggaccaataccgtgaccaacttccagcgtgtcggcctgggctaacgcgctactaagccagctttttgcctcctgtacggtgtcagcccagtttgtatggcgcgggcgtagtgcagccaacgccgcagagagtgtacaaccagtgccgtgggtgtttttggtcataatgcgcggtgcggtaaaccgttgttcaccctcgcgggtaaacagccagtccgggctttgctcatcatccagatgaccacctttcattagcactgcgccacagcccatcgccaacaggcttcgcccttgttccagcatttcctgttcggtgcgcgcgtgtggcgcgtcgagcaaggcggcagcttcgggcaagtttggcgttattaaactaacctgtggcaataatcgactgcgcagcgtagcaaccgcgctaggactaagcagcgggtcgccgctttttgccagcataacggtgtcgagtaccacgttttggatctgataacgttgcaaccgttctgccaccgcttcaacaatatcggtttccgccagcataccgattttagtggtatcgattcgcacatcgctgaacacgctatcgagctgggcggcgacaaaatcaggctcaatgcgatacacgctctgtacgccacgggtattttgcgccaccagtgcagtaataacactgcaaccataagcgccaagtgcgctgaaggttttaagatcggcctgaatccccgcaccaccactcggatcagtaccggcaatcgtcagagcgttaattcgtttcatgcctgcacctcctgcgtcaattgccagagcgcatcaaggaaatgtggaacaaaactgcctggcccctcgcttctggcgactgcgcgttctccggcttgtttcatccagtgacaggcagatgcgacattttccagcgtatcgcctggtaacgcacagcaggcagcgacaaccgcgcttaatgcacagccagttcctaccactttggtcattaacggatcaccaccgtgaataccaatgatacgatgtccatcggtaacataatccatctcgccagtgaccacgacgattgcgccagtttcccgtgccagtgtttgtgcagcgggtatcgcgttagctgcggcgtcagtggtatccactccccgtccgccattagcaatgccagctaatgccatgatttcgctagcattaccacgtatcgctgccggtttaaaagataaaagttcatgacaaaaatggcggcgataatcgagcgcacccaccgctactggatcaagcgtccagggtgtttgagagctttttgcttgctcaacggcagcacgcatcgcctgagcgcgtggctgcgtcagtgtgccaacgttaatcaacaaggcactggcgatagccgcaaactgactggcctcttcggtttcgataaccatcgctgggcttgcaccgagcgccagcaaggtattggcggtaaaggtttgcaccacatcattggtcatgcagtgcacaagaggggaatgttggtgaaaaaggtgtaacgcgtgcgcagattgcgcactacccagcaggtcgacttgcatagtttgctcctgccataacgtgaagaagcaatgacctggtggtccgtgacttccctacgctggcattatccagatcaggtgatacgggtatttctcagccttcacgcagaagggcaccccgagtcgtttggttgcgatgataaatcgcagaggaggatggtaatgtccagcgcacgcgttgtaaacgaggaaaaacggcagttttacaatcgcgttaataaattatttgatataactatccagcaccttcagaacgacatccagatcttcttcacgttttagctcatccccctggtgaacgatgtgttccgtcagatgacctttaatcacttcccgcatcagaccgtttaccgcgccacggatagcagcaatctgttgtaaaactgcagcgcattcgtgcggctcgtcgagcattttcttgagcgccacgacctggccctgaatcttactggcacgcgctttcagtttctgtttatcacggattgtatgagacatggcaacacctggttaacaagaatatgaaaaatcatagcactattaatctactggggggtagtatcaggtactgggggggagtagaatcagattgccgaattaatactaagaattattatcatgaccgaatttacaactcttcttcagcaaggaaacgcctggttcttcatccccagcgccatcttacttggtgcgcttcatggcctggaaccagggcacagtaaaacgatgatggcggcgtttatcatcgccatcaaaggcaccattaaacaagcggtgatgctcggactggcagcaactattagccataccgcagtggtctggttaattgcctttggcgggatggtgatcagcaagcgctttactgctcaaagtgcagaaccgtggctccagctgatttccgcagtgatcattattagcaccgcgttctggatgttctggcgtacctggcgcggcgaacgcaactggctggagaatatgcacgggcatgattatgagcatcatcatcacgatcacgaacatcaccacgaccatggacatcatcaccatcacgaacatggcgagtatcaggatgcccatgcacgagcccatgccaatgacattaaacgacgctttgatggtagagaggtcaccaactggcaaattttgttatttggcttaaccggtggccttatcccctgcccggcagcaattaccgtgctgttgatatgcattcagttgaaagccctgacactgggcgcaacactggtcgtcagtttcagcattggcctggcgttaacgcttgtcaccgtaggcgttggcgcagcaatcagcgttcagcaggtcgcaaaacgctggagcggatttaacactctcgctaaacgcgccccctatttttccagtctgttgattggcttagtcggtgtgtatatgggcgtacatggcttcatgggcataatgcgataactcaatcctttaggcttgcatgttatcttcagcccaggatgattcttaaatcagctatttccgctgactctctgctcgctaaggatgcttttagggcatcctttcatttacactttttacgaaatcatgggatcactaacaaaatatcgcttgtcagttatattgtatggcaggaaagatatgcgactgatattacagatccccaaagtggagagtttatgaccattaaaaataagatgttgctgggtgcgcttttgctggttaccagtgccgcctgggccgcaccagccaccgcgggtagcaccaataccagcggaatttctaagtatgagttaagtagtttcattgctgactttaagcatttcaaaccaggggacaccgtaccagaaatgtaccgtaccgatgagtacaacattaagcagtggcagttgcgtaacctgcccgcgcctgatgccgggacgcactggacctatatgggtggcgcgtacgtgttgatcagcgacaccgacggtaaaatcattaaagcctacgacggtgagattttttatcatcgctaaaaaaagccccctcatcatgagggggaaatgcagacaccttgttattttttattattagccacttgctcgtcttgcttgttattagtcgtatttcacgttgattaatgcggttgcctccagtgcgccagatttaactttgtttgtatcgtagacgtagtaactggctgttatcggaatactaaccgttgtatctgtaagtttactcttcgccgcaacttcctttaaatttgtatatcctttactgctgttagtgatatttaaaagtgtgactgggctaccattactttcaagaataaatcctacgccattatcttccgcacctttcagtattgtgttgctgttggttaacaagtcagaactacttaaatacacctgcattttccgacttgtttgattttgttgacctaataaatttttacaacgcagaataatatccccttgtttactatttattgttgctttgttacctgtggctggtaattgactaacgggaatactgtctaaagtaattaataaatcgtccggtttgcaggttgtggttatcgggttgtaactcaatgtcagattaaaggaatagacacctgcattttgtgccaatgcatttctgtagctatttacacatgcatcccaactcttgccacctaataaacacagtagaaattgtactgcggcactcccgcgtgtgctactactagcactggataatgtcgcaacaccattaatcatcacactaccgccgccccccgcagaaacattcacttttgcattactggccgcaggtgtcaccgtaacactataaccactggtgaaactggtctgattattactcaacgtgatgttgtttttattggtccattcaaaatgtaaatttaattttatggtatcgttataaagtccaacaataatatcgctcgggctcataggggtgatagtatttgtacttacgcaactgctatcattaaaattatgctcatatgtcgccatttgtgtttgagtaagtgcaaaatccccctgaacaaccaagttgtgctgaacagataactcactataacatgccgcatagctcacaggcataaccatcatcattaatataaatagcattatgcgaatttccatagaaccacctgactattactggcaaatataatttctactttcatcaatctctttaccgaaggtgattgtgcaactaagtccttgttgcttatcaattgccacattaacgcttggcggtacttcattggtgcgaataaataactgacttccctggccgacaacgccaatattatgaccatggatatcattgacttcataaccaaacgttaaactttgcccatctgctcttaacgcttttataaaccatggcttgcgctgatcggtatcaaaattaaccagtacaaccgcgccgcgataaggggcggcaattttccggttgccacgtaattctgcttcgctatcgctttggctcacatccagcatcaggtgattttcccgataaggtgtcattccgtcgtatatcaccactccattacggtttgttgtgcgatatttttgcccattgacataagcatctttaattcctggcgcattcatcacagcaaacgtttcggaaagacggttcgccagattaacgccaccgctccaggcgacaatgcccccactaacactggctccagcctgtcgataagtactgctctgactataactgccattcactgtcgcaaccggcgcgttccaggtcaaattcgccccagctgtcgtttcatttccctgatgttgatgactcaggttgacaccataattgaactgatcccgactccctactgttccacttaatcccgtattattactggcaaacccctgatcatcaaacgtcgtactgttagacatatatatttgccgacgaggcgtgctaacgtcatcaccccaatcaaagggaatgcttataaaaatattaaaacgtttctcttcatgatgattctcgtcataagcctggcttgccgcgagggtatagcttatccgtcgcaggttgttggaataactcaactgataatccttactactgccgctacgcccccagtaatctcgccataacgtacttaaactcacagacccccaaccttctggcaaactctggctcatattggcggaaaagctatttttgcggccaaaatcgttctggtaataatcggcaatgtcatagacatcgttttcatcacggcgataattatctttattgtttgcccaaacgtgatcgttaaatgtccggtaatcacggctgctataacgccaggccgccagaccaaaacgcgtgctcgtttggctcacaaatttgttgtaggcaatttgataactttgcccgtcaaacacatcgccgttgtcttgtttactatggctcttagtggcatcgacggaaatggcaccaatgcgtgtattccagccagcccccaaagtaaacgcgtaataattattcgcgaccatgctgccaccatacagcgtcaataaattattaaaaccatactgataacccgcctggacaaaatcactttgtttgctcgccccttcaatatggctacgacccgccgctaaatcatatttgctcacgccgggttgcagcatatttggcaccgctgcataaggcaccagataggtggttacgctgccgtccgcctctttcacgctgacatcaagatctgctccaccaccggccaactgcaaatctgtaatcgcgaacgggccaggaggaacctctttctgataaaccacaaaaccattctgttcaatagttaccagcgcgttactctgagcaatcccctgcacccgtggcgtaaaattttgtttgctgttaggcaacatctgcatatcacgaaacaaccgcacacctctgaagcgaacagaatcaaaaatatcgctacttgtgtacatatcacccacgcgaagcgtgccgagaagttgggcaaatccacgttccagatacagggtattgcttttccacacccctggattgttatttgttttactgaaactggcatcagaatgcagttgccaccccagtaaatttaacccgctgttaaaacgtacatatgtactcttgttattaccgctcgctttatagtcgctgtaatactgactcagataataagaggtataaaacgcattaataccccgctcccagttttccggtggaacatagccactttccagttcttccacccaggcctgcgggacactgaaatcgagacgaaaaaccccgatatcccaggtatagctcccaccctgaacaagttgctcaaatgttaaacattgcttaccgctggcgaagttatcgctattaatgcctaaccgcttgataacttctctacttaaacatgtttcttgcgggttgtctttaacaataatctcatatttcccgcgccattgcttattgacataaatatcgatgtcatactgccccggtaagggttgattatcatcaagacgaatatttgcaacctgctggtctttcattccacctatcataaaatgggtatcaaaggtttcttcagctgcataagcttcaatgccgagcaataacgctacgattgcacttgcaagtggggtcattctcaacataggcagctcctgcaattaaattttgtcactaatatagttgccatggtcatcgataatggtcagatgccagttatttgcattattacttttgacattaacactctgactttctaagggggcaatcataatagtttcataattgactttgacattattagctttgacatcgctaatcgtcacccaattagcactgtcattttttatcaccaaaccattgccactgcgatttaccagcaattttttaaatgtcgctttatttaccggagcaatacccgctggccggtaaaacaacttaattctgttttgcatcgcaaacttcagtgcattcttaccttcttgctctggactatttggtggaatatccagaacattcagataaaaaatgctttctttattagtgggcagtttattcggcataattttgatttttacttgctgcccggaatttgcccctatttttgccactggtggcgttaacatgaaaggaacctgaattttttctggtggtaaactcgtatcgccatcatcaatccacgcctgcagcaggctagaacggtttccctggttcatcaactgcaccatcacttctttattttctgccgggtaaataatgcgcgtcccgtagataacaattccggcatgtgcaggaaggaccatagaaaaaatgagtaaagataataatcctttcattttaatgcctcttaaattaaaaggccgccatgggatagcggccatgtttattacctggagaaacttacaattttatttattaatcctgcgccacacgcataaccagagaagataacacatcaccactttgcacactgttatctgtcagtttcaggtattttgctttaaacggaatagcatattgaccttccgctgttttataactctcaatgttaaaaggtgcagaaacatccaggacatcgctgttatcacctaaatagagatagtaacccacggtatcgttgctactggctatcgccttatcgttaccggttattttatcgttggtaatcaagctgagttttacaccagcaacttctttcgggcagctaatttttaacatgctgctggttacaccgactgcatcatcataggtagaatatttagctttaccttcaaagacactggttggtacagtcggcatattaatacttacactatcaccacccgcttcgaatttacacggagattctgcaatattccccttaatagttaatgttccggtatcaacgtctgcagcaaatactccagcgctcataaaaaaagaagaaaagacagcggcagcaataatactacgtttcataatatgttccttaataaaatttatttttggttgttaagagtctgtatctcttggaaacaaatttctcacatcaaaaaagttgccgcaatgtaaacacattgttttattgatttaaaacaaattaaccattgcaatataaatacaaaaaatatttaagagtattaactatttatcgcatctatcaattaatgtagatttatgtaaatggtattgttgatatcaataaaaaagccgaaatcatttatataaatgatttcggctttctaaatgcaattaaaatcaggttgccaaattaatcgtagcgatttaacacgattcgacgtttgctatcgctacctgcaacaaccacttctgtcgttacacctttgacggggctagaaaacagatgacgggtgtcaacattatacgttaactgaccacaatgctgttgaggttgaccattaaccatagccatactgcatgttgggggactgatcctgccattaatcgctaatgtggcagtctcactagagaatgcgggagaagccaatccataggcaagaaaaataattccactcagccaatacttattcattgaacgttatccctgtagtaaaggttatgcctggatagaatgagtgcataacaaactatagctgtacatccactacacagccacgaaggatgataatgaagcattgcctgtatgatcaatcgactttgtagagtttcggacgaaggtccgcagaatattcgcagtattaaataagtgttcattaatgcggcaaaaactaatacaccgcatcaatgtaacatctctgcggtgtatgaagaataaccagaatggttaataggcgttagaccgcgcggaaggaaatctcgcctggaatgacttcaccctgccagtagagctgagctgcaacgcggtcagccagctggcggtagatagcggtaaattcgctctccggacggctgataaccgttggcgtacctttatcgagatcctcacgtaaggagatgtgtaacggcatctgccccagcagctgtgtatggtatttttcagccagtttctctgcaccaccggtaccgaaaatcggttcatggtgaccacagttactgcaaatatgcacactcatgttctcgacaataccgagcaccggaacctcgactttctcgaacatcacaatgccttttttcgcatcgatcagcgcgatgtcctgcggggtggtgaccacgactgcaccggttactggaatgttttgcgccagcgtcaattgaatgtcaccggtgcctggcggcatatcaagcaccagatagtcgagatccggccacaaggtttcctgcaacatctgcattaacgccttgctcgccatcggtccacgccacaccatcgcattgtcgtcagtgaccagataaccaatactattggttgccaggccatgagacataatcggtgccatatgggtaccgtccgggctagttggacgctgattttctgcgcccaacattgttgggatacttgggccgtagatatcggcgtccagaatgccgactttcgccccttctgccgccagcgccagtgccaggtttaccgccgtggagcttttacccacgccgcctttaccggaactcaccgcgataatgttcttcacaccgttaattcccggctgattcttcacgcgtttcagagtggctatgttatggctcagtttccagtcgatagctttcgccccggtgatgcgcagcagttcggcgctacattgctcttttaactcttcgaacgcgctatgccagacaaacggcataaccagttccacatgcaacgtgtcgtccatccaggcgacatggtgcaacgctttcagcgtggtgaggttatgcttcagggttgggtgctgaaaattggccagtgtcccggcgaccattgcgcgcaaggcttctggacttttggcctgggattgttcgttcatcccgactccttttttgtatagataaaccatcagctgatagtttacctgaagaatatagagaagtacttacttaacattttcccatttggtactatctaaccccttttcactattaagaagtaatgcctactatgactcaagtcgcgaagaaaattctggtgacgtgcgcactgccgtacgctaacggcagtatccacctcggccatatgctggagcacatccaggctgatgtctgggtccgttaccagcgaatgcgcggccacgaggtcaacttcatctgcgccgacgatgcccacggtacaccgatcatgctgaaagctcagcagcttggtatcaccccggagcagatgattggcgaaatgagtcaggagcatcagactgatttcgcaggctttaacatcagctatgacaactatcacagcacgcacagcgaagagaaccgccagttgagtgaacttatctactctcgcctgaaagaaaacggttttattaaaaaccgcaccatctctcagctgtacgatccggaaaaaggcatgttcctgccggaccgttttgtgaaaggcacctgcccgaaatgtaaatccccggatcaatacggcgataactgcgaagtctgcggcgcgacctacagcccgactgaactgatcgagccgaaaagcgtggtttctggcgctacgccggtaatgcgtgattctgaacacttcttctttgatctgccctctttcagcgaaatgttgcaggcatggacccgcagcggtgcgttgcaggagcaggtggcaaataaaatgcaggagtggtttgaatctggcctgcaacagtgggatatctcccgcgacgccccttacttcggttttgaaattccgaacgcgccgggcaaatatttctacgtctggctggacgcaccgattggctacatgggttctttcaagaatctgtgcgacaagcgcggcgacagcgtaagcttcgatgaatactggaagaaagactccaccgccgagctgtaccacttcatcggtaaagatattgtttacttccacagcctgttctggcctgccatgctggaaggcagcaacttccgcaagccgtccaacctgtttgttcatggctatgtgacggtgaacggcgcaaagatgtccaagtctcgcggcacctttattaaagccagcacctggctgaatcattttgacgcagacagcctgcgttactactacactgcgaaactctctagccgcattgatgatatcgatctcaacctggaagatttcgttcagcgtgtgaatgccgatatcgttaacaaagtggttaacctggcctcccgtaatgcgggctttatcaacaagcgttttgacggcgtgctggcaagcgaactggctgacccgcagttgtacaaaaccttcactgatgccgctgaagtgattggtgaagcgtgggaaagccgtgaatttggtaaagccgtgcgcgaaatcatggcgctggctgatctggctaaccgctatgtcgatgaacaggctccgtgggtggtggcgaaacaggaaggccgcgatgccgacctgcaggcaatttgcagtatgggcatcaacctgttccgcgtgctgatgacttacctgaagccggtactgccgaaactgaccgagcgtgcagaagcattcctcaatacggaactgacctgggatggtatccagcaaccgctgctgggccacaaagtgaatccgttcaaggcgctgtataaccgcatcgatatgaggcaggttgaagcactggtggaagcctctaaagaagaagtaaaagccgctgccgcgccggtaactggcccgctggcagatgatccgattcaggaaaccatcacctttgacgacttcgctaaagttgacctgcgcgtggcgctgattgaaaacgcagagtttgttgaaggttctgacaaactgctgcgcctgacgctggatctcggcggtgaaaaacgcaatgtcttctccggtattcgttctgcttacccggatccgcaggcactgattggtcgtcacaccattatggtggctaacctggcaccacgtaaaatgcgcttcggtatctctgaaggcatggtgatggctgccggtcctggcgggaaagatattttcctgctaagcccggatgccggtgctaaaccgggtcatcaggtgaaataatcccccttcaaggcgctgcatcgacagcgccttttctttataaattcctaaagttgttttcttgcgattttgtctctctctaacccgcataaatactggtagcatctgcattcaactggataaaattacagggatgcagaatgagacactttatctatcaggacgaaaaatcacataaattcagggcagttgagcaacagggaaacgagttgcatatcagttggggaaaagttggcaccaaagggcaaagccagataaaaagtttttcagatgctgcggcagcggcaaaagcggagcttaagctgattgcggagaaggtgaagaaggggtatgtggagcaagcgaaggataattctttgcaaccttcccaaacggtaacgggctctctcaaggtagcggacttatccaccattattcaggaacaaccctctttcgtagcagaaacccgtgcgcctgacaaaaatacagatgctgttttaccgtggctggcgaaagatattgctgtcgtttttccgcccgaagttgtacacaccacgttaagtcatcgccgctttcccggagttcctgttcagcaagcagacaaattgccccaattacgtcgcttagcctgtagtgtgtcgcaacgggataataaaacagccacatttgacttcagcgcctgttctttagaatggcaaaacaccgtcgcccaggcgatcagtcagatcgacggcctgaaaacaacacagttaccatcaccagtaatggctgtactcacggcacttgaaatgaaatgcacaagatataaagtgcgtgaggatgttatggatcagatcgtccaggaaggcggtctggaatatgctactgatgtaataatacaccttcaacagattgatattgaatgggattatgcgaataatgtcattattattctgccgtctggcattgcacctagctacttggagcaatattccagatttgaatgacgcctacgtaaacatttatcactgacggaagagtctctctggcaaaaatgtgcacaaaaacttattgccgcaattccacatattccagaatggcggcaaccattaattgctttgttattacccgaaaaaccagaaattgcacatgaaattgcccagcgtctactggggcaaaaaaaattaccctcgcttgagtggttaaaaatagtggcgactgatgagcacattcttgcctcattagaaaaatatcacgaaccatatgccatttttgatgattactattgtggtgcgatatggtcagccaccgtattacaggagcaaggtgttgcagccctgccccgatttgctccctatgccgcaagtgactactgcgccgatgtgttgcgtcatatcaatcatccgttcgcattgacactgcttatacgtgtagccgggcaaactaaacgctgtcacgatcggatgacgaaagccattgctgcgttcccacatgcagcaatggcggcactgacggaacttcttgggcaaaaagaagagaacagttggcgcattatgctaatgacaatgcttatctcacaaccagcactggcagaacaggtcattccctggctctcgacacccgcagttgccgtactgaaatcatgccagcaacaactgacacagccctcaaaccatgccagcgccgatctactgccagccgtagtagtctcccctccctggctttcgaaaaagaaaaaatcgccgattccggtgctggatttagcgccattaggcattgagccaatctgttatctgacagaagaaatcagtaatcaacttttggcgaaatatatctggtattcaaaacacatcacggttagccatgaagaaagtactaccaacctgttggcaaggatgggttttcaacgacggatcgctggtacatatattaaagctcccgaagcggtagttgaggcatggctaaatgaagattattcaaccttactaagtgaatttaaggtgtttcattcacctaccgggcattattggcagttggggattttgacaacattgccgctggagaaagcagtaaaagcatggaatgcccttaccctatctccacataccgataccgaatactccatgttacattttggactcaaagggttacctgggttagtaaactcacttgcacgctatccacaagaagccttgcccatcacgaattacttcgcagcgagtgagctggctcctgccgtcgcccgtgccttcaacaaactgaaaacgctacgcgaaaacgcccgtagctggctgttgaaatacccggaacatgcccttaccggcctgctgcctgcggcgctcggcaaagccggtgaagcacaggataacgcccgcgctgccttgcgtatgcttaccgaaaacggtcatcagccattactgcaagaaatcgcccgacgttataaccagccggaagtaaccgatgcggtgaacgctctgcttgcgctcgatcccttagataatcacccgacaaaaatccccactcttccggccttttatcagccatcgctctggacgcgcccggtattaaaagcaaatgcccaatcactgccagatagcgccctcctccacctcggtgaaatgctccgcttccctcaggaagaggctctgtatccgggattattgcaggtgaaagacgtctgttccgccgactcactggcgggatttgcctgggatctgtttaccgcctggcagaccgctggcgcgccgtcgaaagagagttgggcgttcactgcgttaggcgttctcggtaacgatgacaccgcccgcaaactgacgccattaatacgcgcctggcctggtgaatcccagcataaacgcgccaccgttgggttggatattctcgctgctatcggtagtgatatcgcccttatgcagcttaacggcatcgcccagaaactgaaattcaaagcattacaggagcgggcaaaagaaaaaattgccgacattgccgagagccgcgaactcacggtggcggagcttgaagatcgggttagcaccggatctcggtctggatgataacggttcgctgctgctggattttggcccacggcagttcaccgtcagctttgatgaaaccttaaaaccgtttgtgcgtgatgtttccggcagccgcctgaaagacctgcccaaaccgaacaaaagcgatgatgaaacgcgggcgaacgatgcggttaaccgctacaaattgctgaaaaaagatgcgcgtaccatcgccgcccagcaggtagcaaggctggaatccgccatgtgcctgcgccgccgctggtcgctggaaaacttccagctcttcctggttgagcatccgctggttcgtcacttaacccgccgtctgatttggggcgtttatagcgccgaaaaccagctactggcttgctttcgcgtagcagaagataacagctccagcaccgctgacgatgatcttttcaccctgccggaaggcgatatctctatcggcactcctcacgttctggaaatatcaccaacggatgctgccgcctttggtcagctttttgccgactacgaactgctaccaccgttccgccagctcgaccgtaacagctacgccctgacagaagccgagcgcaatgccagtgaactgacccgctgggcaggcagaaaatgcccgagtggtcgggtcatggggctggcgaataaaggctggataaagggcgaaccacaggatggaggctggatcggatggatgatcaaacctttgggtcgctggtcgttaatcatggaaatcgatgaaggctttgcggtaggcatgtcgccagccgaactcagcgctgagcagctcttaagcaagctgtggctatgggaaggcaaagcagaaagatatggctgggggagtaattcaacacaggaagcgcagttctccgtaatcgatgccatcaccgccagcgagctaattaacgatattgaagccctgtttgaataaggaaagagcatggacaaggaattaccgtggctggcggataacgcccaactggaactgaaatataaaaaaggcaaaacgccgctcagtcatcgtcgctggccgggcgaaccagtgtccgttatcactggaagtctcatccagacattgggtgatgaattgctacaaaaagctgagaagaaaaaaaacattgtctggcgttatgagaattttagtctggagtggcagtccgccatcacgcaggccatcaacttgatcggcgaacacaaacccagtatcccggcccggacaatggcggcgctagcctgtatcgcgcaaaatgacagccaacagttgctcgacgaaatcgtccaacaagaggggctggaatatgcgactgaggtggtgattgcacgccagtttattgcgcggtgttatgagagtgatcctctggtagtgacattgcagtatcaggacgaggattatggctatggttatcgcagtgaaacctataacgaattcgatctccgactgcgtaagcatctctctctggcagaggaaagctgctggcagcgttgcgccgacaaactcattgccgcactaccaggaataaacaaagttcgccgcccttttattgcgctgatcctcccggaaaaaccagaaatagccaatgagttggtaggccttgaatgcccgcgaactcattttcattctaaggagtggttaaaagttgttgctaatgaccccacagcggtgagaaaactcgaacactactggagccaggatatatttagcgatcgagaagccagctacatgagccatgaaaaccacttcggctacgcggcctgcgccgcccttttgcgcgaacaaggactggcagccattccgcgcctcgcgatgtatgcccataaagaagattgcggcagtctgctggtacaaattaaccatccgcaagtcatccgcaccttgctactggtggctgataaaaacaaacccagcctgcaacgtgtagctaaataccataaaaacttcccccatgcgacgctcgccgcactggcagaactgctggcgttaacagaaccaccagcccgccctggttatccaatcatcgaagacaaaaagctgcctgcacagcaaaaagcacgcgatgaatactggcgtacgctgttacaaacgctgatggcaagccagccacaactggcagcagaagtgatgccgtggttaagtactcaaccccagagtgtgctgaagagttatttaagcgcaccgcccaaaccggttattgatggcaccgataacagcaatctgccagaaatcctcgttagtccaccgtggcgtagtaagaaaaaaatgacagctccacgtcttgatttggcaccgctcgaattaactccgcaagtttactggcaaccaggcgaacaagagaggcttgccgccactgagcctgcccgttatttcagcacggaatctcttgcgcaacgcatggaacaaaaaagtggacgagttgtattacaggaactgggttttggggatgatgtatggctgtttctgaattatatactccccggaaaactggatgctgcacgcaatagtctctttgttcagtggcattactaccaggggcgggttgaagagatcctgaatggctggaactccccggaagcacaattagcagaacaggcgctccgcagcggtcacatagaagcgttaattaacatatgggaaaatgacaactacagtcattatcgtccggaaaagagtgtctggaacctgtatttattggcacagttgccgcgtgagatggctttgaccttctggctgcgtatcaatgagaaaaagcatctgttcgcgggtgaggactattttctcagtatcctcggattggatgcgctaccaggtctgctgttggcttttagtcatcgtccaaaagaaacatttccgttaattttaaattttggcgcaacagaactggcgctgcctgttgcccacgtctggcgacgtttcgcggcgcagcgtgatctggctcgccagtggattttacaatggccggaacatacggctagtgcacttatccctcttgtctttaccaaacccagcgataatagcgaagccgcattacttgccctgcgtttactgtacgaacagggacatggcgaattgctacaaaccgtggcaaaccgctggcagcgtacagatgtatggtctgccctggagcagttgcttaaacagggtccaatggacatttacccggcacgcattccaaaagcccctgatttctggcatccgcaaatgtggtccaggccgcgccttatcactaataatcaaactgttaccaatgacgctctggaaattatcggcgaaatgctgcgctttacccaggggggacgtttttatagcgggctggaacaactgaaaacgttctgccagccacaaacgctggcagcttttgcctgggatctcttcactgcgtggcaacaagctggtgcccccgcaaaagacaactgggcatttctggcgttaagtctctttggtgacgaaagcacggcacgggatctgacgacacagatcctcgcctggccacaagaaggcaaatctgcccgtgctgtcagcggcctgaacatccttaccctgatgaataatgatatggcgctgatacagctgcatcatataagccaacgggctaaatcccgccccttacgtgataacgcggcggaatttcttcaggtggtcgcagaaaatcgcgggctaagccaggaagagctagcggacagattagtcccaaccctgggccttgatgatccgcaggcgttgagttttgattttggtccccggcagtttaccgttcgcttcgatgaaaatctcaacccggttatctttgatcagcaaaacgttcgccagaaaagcgttccccgtttgcgcgccgatgacgatcaactgaaagcgcccgaggcactggcccgactaaaagggctaaaaaaagatgctactcaggtgagcaaaaacctgctcccgcgtcttgaaacggccctacgtaccacccgacgctggagcctggcagattttcattctctgtttgttaatcatccctttacccgtctggttacccagcgattaatatggggggtttatccggcaaatgaaccgcgttgtttactcaaagcctttcgtgtggccgcagagggggagttctgcaatgcgcaagatgagccaattgacctgcctgcggacgctctgattggcattgcccacccgttagaaatgacagcagaaatgcgcagtgaatttgcacagctttttgccgattacgaaattatgccgccttttcgccagttgagccgccgcacggtgctgctcacacctgacgagagtaccagtaacagcctgactcgctgggaaggtaaatccgctaccgttgggcaacttatgggaatgcgatacaaaggctgggagagtggctatgaggacgcatttgtctataacctgggtgagtaccggctggtccttaagtttagtcccggttttaaccactacaatgttgatagcaaagcgctaatgagcttccgttctcttcgagtgtaccgtgacaataaatccgtcacttttgccgaacttgatgtgtttgatttgagtgaggcgttaagcgcacctgacgtcattttccattaaaacacagcgggcagtgatgcaactgcccgttatcaacacgacttaccagcggggaaagcgatgatcgtgcaaaaagagctggttgctatttacgattatgaggtccctgtacctgaagatccgttttccttcagacttgagatccataaatgctctgaattatttacaggttccgtctatcgactggagcgattccggctacgtccaacatttcatcaacgtgatcgagaagatgctgacccgctaataaatgatgcgttgatttatataagagatgagtgtattgatgagcggaaattacgaggtgaaagtcctgaaactgtaatagcaatttttaatcgtgaactacagaatatattcaaccaagaaatagaataatatactctaaataattcaaattggtccgatccggcgcaacgtcccaatggcctggattataaatctcattatcttaattgcaacggggtccagccgtggttataattcgttcgttggaacacgatgttgcacaggctgtggtgttaggcctgaaaatagtaaataaaagaacctgcctcaccagcaggtttttttatttactgtgatctgctttccagatatttttcgctcaaacaactaatgcgccaaacatttattgcgcgtaaaatatcgtttatttcattaatacatttcagggatgaatatatgagtccgcagaataatcatctgcagcgtccgcctgctgctgtgttatacgccgatgaactggcaaaattaaaacaaaatgataacgcaccttgcccgcccggttggcagttaagtttgcctgcggcccgtgcttttatccttggcgacgaagcgcaaaatatcagccgtaaagtggtgattagcccctccgctgtcgaacgtatgttagtcactcttgctaccggccgcggtttgatgttggtgggggaaccgggtaccgcaaaatctcttctttctgaattactggcaaccgctattagcggcgatgccgggttaaccatccagggcggggcatctaccaccgaagatcaaatcaagtatggctggaactacgccctgcttatcaatcatggtccgagtacggaagcgctggtccctgccccgctttatcagggaatgcgcgacggcaaaatcgtccgtttcgaagagataacgcgtacaccgctggaagtgcaggactgtctgttaggtatgctttctgacagggtgatgacggggccggaactcactggtgaagccagtcagctctatgcgcgagaaggctttaatattattgccactgccaatacccgcgatcgcggcgtcaatgaaatgagtgctgcgctaaagcgtcgcttcgattttgaaacggtttttccgattatggatttcgcccaggagttggaactggtcgccagtgctagcgcgcgtttgctggcccatagcggtattccgcataaagtgcctgacgcggtactggaattactggtccgcaccttccgcgatctgcgtgccaacggcgaaaagaaaacgagtatggatacactgacagcgattatgtccaccgctgaagccgtgaacgtggcccatgctgtgggcgtccgcgcctggtttttagcgaatcgcgcgggggagcctgccgacctggtggaatgtattgccggaaccatcgtcaaagataacgaagaagatcgcgcgcgtctgcgccgttacttcgaacagcgtgtcgccacacataaagaagctcactggcaggcttattatcaagcccgccaccgcctgccgtgaggaaagatgcatgagcgagccgttaattgtcggcatccggcatcatagtccggcctgcgcccggctggtgaaaagcttaatcgaaagccagcggccacgatacgtgttgattgaaggcccggctgattttaatgaccgggtagacgaactgtttttagcccaccagcttccggtagctatttacagttattgccagtatcaggacggtgcagcccccgggcgtggtgcctggacgccatttgctgaatttagcccggagtggcaggcgctacaagccgcacgtcgcattcaggcacaaacttacttcatcgatttgccttgctgggcgcagagtgaagaagaggacgatagccctgatacgcaagatgaaagccaggccttactgctgcgtgccacccgcatggataacagcgataccctgtgggatcacttgttcgaagatgaaagccagcaaactgcattaccctctgcgctggcgcactattttgcccaactgcggggcgacgcctccggcgatgcgctcaatcgtcagcgcgaagcctttatggcccgctggattggatgggcgatgcagcaaaataatggcgacgtgttagttgtctgcggtggctggcacgctccggcactggcaaagatgtggcgcgaatgccctcagaaaattaacaagccagaattgcccagcctggcagatgccgttacaggttgttatctcacaccctacagtgaaaagcgccttgatgtgctggcaggataccttagtggaatgcctgccccggtatggcaaaactggtgctggcagtggggcttgcagaaggccggtgaacaactgctaaaaactatccttacccgtttgcgccagcacaaattgcccgcttctaccgcggatatggctgccgctcatctgcatgcgatggcgctggcacagttgcgcggtcatacactaccgttacgcactgactggctggatgccatagcaggcagcctgattaaagaagccctgaacgcgccgttgccgtggagctatcgcggcgttattcatcccgataccgatccgattctgctaacgttgatagacacattagcgggtgacggattcggtaaacttgccccttctacgccacaaccgcctctgccaaaagatgtcacctgcgaactggaacgtaccgcaatctcccttccggcggagcttaccttaaatcgctttacccccgatgggctggcgcaaagtcaggtgttacatcggctggcaatactggagatccctgggattgtacgccagcagggaagtacactgacacttgcaggcaacggtgaagaacgctggaaattaacccgcccgcttagccagcatgcggcattgattgaggccgcctgttttggtgccacactccaggaagccgcacgcaataaattagaagccgatatgctggacgcgggcggaatcggcagtatcaccacatgtcttagccaggcggcgttagcgggtctggcgtccttcagtcaacaattactggagcaactcacactattaatcgcccaggaaaatcaatttgccgaaatgggccaggcgctggaagtgctttatgccttatggcggctggatgaaattagcggtatgcaaggcgcgcagatattacaaacgacgttatgcgcgactatcgatcgcacgctgtggctgtgtgaatctaacggcagaccggatgaaaaggagtttcacgctcacctgcatagctggcaagcgctttgccatattctgcgcgatctacatagcggcgttaatttacccggcgtttctctttctgcggcggtagccttactggagcgacgcagtcaggcaattcatgccccggcgctggatcgcggcgcggctcttggcgcactaatgcgtctggaacatcccaacgccagtgccgaagcggcgctgacgatgctggcgcagttatccccggcacaatctggtgaggcgctgcacggtttgctggcgctggcccgccatcaactggcctgtcagccggcatttatcgccggtttcagcagtcatttaaatcaactgagtgaagccgattttattaacgccctgcccgatttacgcgcggcgatggcctggctaccaccacgagaacgcgggacgctggcgcatcaggtgcttgagcattatcaactggcgcaacttcccgttagcgcgctgcaaatgccgttgcattgtccaccacaggccattgcacatcatcaacaactcgaacagcaggcactggcaagcctgcaaaactggggagttttccatgtctgaactgaacgatcttctgaccacccgtgagctacaacgctggcgattaattcttggcgaagcggcagaaacgacgctttgtgggctggatgacaacgcccggcagatagaccacgcgctggagtggctgtatgggcgcgatcctgaacggctccagcgtggtgaacgttccggtggattaggtggcagtaatctcaccacccctgagtggatcaacagtattcacacgctgtttccgcagcaggtgattgagcggctggaaagcgatgccgtgctgcgctacggcattgaagatgtggtgacgaatctcgacgtgctggaacgtatgcagccttctgaaagcctgctacgcgctgttttgcacaccaaacatctgatgaaccccgaagtactggctgccgcccgccggatagtgtgccaggttgttgaagaaattatggctcgactggcaaaggaagttcgtcaggctttttctggtgtccgcgatcgccgtcgccgtagttttattccactggcgcgaaactttgatttcaaaagtactctgcgcgccaacctgcaacactggcacccgcaacacggcaagttgtatatcgaatccccccgctttaacagccgcattaaacgccaaagcgaacaatggcaactggtcttactggttgatcaaagcggaagcatggtcgatagcgtgatccactctgcggtgatggcggcctgtttgtggcagttacccggcattcgtacccatctggtggcgtttgacacaagcgtcgttgatctcacggcagacgttgccgatccggtagagttattaatgaaagtacagttgggcggcgggaccaatatcgccagtgccgtggagtatggtcggcaacttattgaacaaccagcgaaaagcgtcattatcctcgtgagcgatttttacgaagggggtagtagtagtttactgacgcatcaggtgaaaaagtgtgtccagagcggcatcaaagtgctgggactggcagcgctcgatagcaccgcaacaccttgctatgaccgcgatacggcccaggcgctggttaatgtcggcgcacaaatagccgccatgacgccgggcgagctggcaagttggcttgcggagaatcttcagagttgacataacttgcggagaatcttcagtcatgaatagtctacgtccggaattattagaactgacaccgcaggccctgacggcgttaagcaatgccggttttgttaagcgcagtcttaaggaactggaaaatggcaacgtcccggagatcagccatgagaacgacgctttaatcgccaccttcagtgacggtgtccgtacccagctggcgaacggccaggcactgaaagaggctcagtgcagttgcggggccaacggtatgtgccgtcatcgcgtgatgctggtgttaagttatcaacgactttgtgccaccactcagtctacggaaaaagaagaagagtgggatccggcaatctggctggaagaactggctacccttcccgatgctacccgcaaacgcgcacaggcgctggtcgctaaaggcatcaccattgagttgttctgtgcgccgggtgaaattccctctgcccgcttaccgatgagcgatgtgcgtttttattcccgcagcagtattcgtttcgcccgttgtgattgtattgaaggcacactttgcgaacatgtcgtactggcggtacaggccttcgtcgaggccaaagcgcagcaagcagaatttaaccatttaatctggcagatgcgcagcgaacacgtcacaagttctgacgatccgtttgccagcgaagaaggcaacgcgtgtcgtcaatatgttcagcaattaagccagacattatggcttggcggcatcagccagccgctcatccattacgaggcagcattcaaccgcgcattgcaggcggcagagacctgcaactggcgctgggtgagtgaaagcctacggcaactgcgcgccagcgttgatgccttccacgcccgcgccagccactataatgccggagaatgcttacatcagcttgcggcattaaacagtcgattaaattgcgcacaagagatggcccggcgcgacagtattggtgaagttcctcctgtgccgtggcgcacggtcgttggctctggcattgccggagaagcaaagcttgatcatctgcggctggtgtctttaggtatgcgttgctggcaggatattgagcattatggtttacgcatctggtttaccgatcccgacaccggcagtattttgcaccttagccgcagttggccgcgaagtgaacaggaaaacagtccggcagctacgcgtcggctgtttagttttcaggctggcgcactggcgggcgggcaaattgttagtcaagcagcaaaacgcagtgccgatggcgagctgctgttagctacccgcaaccgcttaagcagcgttgtgccgctgagccctgatgcctggcaaatgttgagcgcgccgttacgccagccgggcattgtggctttgcgggaatatttacgccagcgtccccccgcctgcatacggcctcttaatcaggtcgataacttatttattctgccggtcgctgagtgtattagcctcggttgggacagcagccgccagacgctggatgcgcaggtcattagcggcgaaggggaagataatgtgctgacgttaagtttaccagccagtgccagcgcaccttatgccgttgaacgcatggcggcgcttttgcaacaaacagacgaccccgtgtgtctggtttctggctttgtcagttttgttgaagggcaattgacactggaaccacgggtgatgatgacaaaaacccgtgcctgggcgctggacgcagaaactacgcctgtggcaccgctaccttctgccagcgttttgcctgtgccgtctactgctcatcagttgctgatacgctgccaggcgttacttattcaactgctccataacggctggcgctatcaggaacagagtgctattggtcaggcataattgctggcgaatgacctcaccgcggtgggtttttatcggctggcacatgtgttgggacaatttcgtaatacagaaagcgaggcacgggtagaagcaatgaataacggtgttttgctttgcgaacaattattccccatgcttcagcaacaaggatgaaatagtgctttttactaagagttctactccagttccggactgctcacgccacggtattaggcatatcctatatagcccctggtgagagtcaccagttccttgattaaataaaatggagttttacatgaaggctttcaataagctgttttccctcgttgttgcatctgttctggttttctctcttgctggctgcggtgacaaagaagaaagcaagaaattcagcgccaatctgaacggcactgaaattgccattacctatgtctacaaaggtgacaaggtgcttaagcaatcttctgaaaccaaaattcaatttgcctccattggtgcaaccaccaaagaagatgctgccaagacacttgagccgttaagcgccaaatacaaaaacatcgcgggtgttgaagaaaaattaacctataccgatacctacgcgcaggaaaacgtgactatcgatatggaaaaagtggattttaaagccctgcagggtattagtggaatcaacgtttctgctgaagatgccaaaaaaggtatcactatggcgcaaatggaactggtgatgaaagccgctggttttaaagaagtgaaataatcggttggcggtcatgctctaaacatgaccgccaattttttagccttttttcacatgctggcgcgctgccagtccacgcagaaaataacgtaaaaattgatcgccgcattcgcggaagtttttatgatccggtgcgcgcatcatcgctgtaatttccggcatgctaacgcggaactgctgttcggtgaggatagccagaatgtcatcggttttcaggctaaacgcgatgcgtaattttttcagcacgatgttgttattaatgcgacgttccggctccagtgccggagcagactcatccttgccgcgtttttcataaatcaggccattgaggaaactgctcaaaacaatgtccggacaacgctgaaaaccctcttcgtcttctttacgtagccagacggcgatctgttccgcggtggcttcgacattacccagcgccagaatacgcaccaggtcattattattggctttcaaaatgtagcgcacgctgcgcagaatatcgttacttagcatgaggccttcaggtgttgatgaggcaaaaagccattttagcagtcttttacaggccaatcgcctcttttaagcttttcagataacggcggctgaccggcacggttaagccattacgcaaaatcaactcggcctggccgttatcttccagacgaatctcctgtaaatgcgcgaggttaaccagatactgacgatggcagcgcagtagtggtgtacgactttccagggtacgtaatgtcaattcggtaaagccctctttcccttcgtggctggtaacgtagacaccgctcatccgactgctgacaaatgccacatctttcatttgcagcaaataaatccgactatgccccgtacaagggataaatttcagcgcctgttgattttccggtaacaggctaacatcctgcttgctgcgctcctgacgcaatcgcgccagcgttttctccagtcgcgcttcatcaattggcttcagcagataatcaaaggcatgttcttcaaaggctttaattgcgtattcgtcaaacgcagtgagaaaaacaatatacgggcgatgttccgggtcaagcatccccaccatttccagaccactgatgcgcggcatctggatatcgagaaacagcacatccgggcgcagtttatgcaccgcgccgatcccttccacggcgttactacactctccaacgatttcaatatcgctctgctcctgcaaaaatacacgcaggttctcccgtgctaacggttcatcatcgacaattaagactttaatcatgcctcgtccctccatggtagtcgtaacgttattcgggtgtaactatcaggctcacaggcgacgcttattccatagtcatcgccaaaccgttcacgtaaacgcttatccaccagattcatccccagcccactggcattggttaccggttgatacaaaccggcattgtcttcgatctccagcatcaaatgttgcccctcacgtcgggcgctgattgccactcgccctgtatccagcagttgacttgtcccatgtttaatggcgttttccactatcggttgcagggtaaacgcgggcaattgctgctgggataattcttgcggaatagcaatgttgacctgcaaccggctctggaagcgcgccttttcaatttgcagataagcattcacatgttcaatttcgtcggcgagagtaacaaactcgctaggccgctttaagtttttgcggaaaaaagtggaaagatactgcaccagctggctggcctgttcgctgtcgcggcggatcaccgctttaatggtgttaagcgcattaaacaaaaaatggggattcacctgggcgtgaagcagtttgatctcactctgggtgagcatcgctttttgccgctcatattgcccggcaaggatctgcgcgctaagcaattgcgcaatcccctcacccaacgtgcggttgatgctactgaataaacggtttttggcttcatacaatttgatggtgcccatcacccgctgattttcaccacgcaacggaattaccagcgtgctccccagtttgcattgcggatgcaaagagcaacggtaaggtacttcgttgccatcagcgtagaccacttcaccggtttcaatcgcttttaaagtataagtactagaaatcggtttgccgggtaaatggtggtcgtcaccaattccggtaaaggccagcaatttctctcgatcggtaatcgcgactgcaccaatatccagttcctgatacagcacctgagccactttcatgctgttcacttcgttaaacccctggcgcaaaatgccttccgtgctggctgccactttcagcgcagtggcagaaaaagcgctagtgtatttttcaaacatcgcgcgtttatcgagcaatatacgcataaacagcgccgcgccgacggtattggtgaccatcattggcgcagcaatattactcaccagacgcaccgcatcttcataaggtcgggcgatcgcaaggatgatcagcatttgcaccatttcagcgacgaacgtgacggcaccggcggtaatggggttaaagactttatcagtgcgcccgcggcggatcaggatgctgtgtaccaggccaccgagtaatccttcaacgatggtgctgatcatgcaacttaacgcggtcatgccccccatgctatatcgatgtaagccgccggtcagcccaaccagcccaccgacgaccggaccgccgagtaagccgcccattaccgcgcctatcgcacgggtattggcaatagaatcgtcaatgtgcaacccaaaccaggtgcccatgatgcagaagatggaaaagacgatgtagcagagaaatttatgcggcagacgaaccgtgacctgcattaacggtatgaataatggcgttttactcattaaccatgcaatgactaaaaaaacgcacatctgctgaagcagcagcaacaccagattaaaatcgtacatacccgcaaaccacacttccctttaaaacgcgtaacatacattgcctgcgtttaactttctttgaactcttgcagaaaaatgagaattcgtgagtacgatcactcaaaatcgcctggcaaaaataaaatcaccctatagatgcacaaaaaacgggcaaaactacctggttcgcaaaactgcgtctaaagttaaaccgggacctcgcgagcaagggtgagacgatggcgctttacacaattggtgaagtggcgttgctttgtgatattaatcctgtcacgttacgcgcgtggcagaggcgttacggattgctgaaaccgcaacggacagacggcggtcatcggctgttcaacgatgccgatattgaccggatccgcgagatcaaacgctggatcgacaacggcgtgcaggtcagcaaagttaaaatgctgctcagtaatgaaaatgttgatgtgcagaacggctggcgcgatcagcaagaaacattactgacttacctgcaaagcggcaatctacatagcctgcgaacgtggatcaaagagcgcggtcaggattaccccgcccagacactcaccacacatctgtttattcctctgcgccgacggcttcagtgccaacaaccgactctccaggcgctgctggcgatcctcgacggcgtactgatcaactacatcgccatttgtctggctagcgcacgtaaaaaacagggtaaagatgcgctggtggttggctggaatattcaggataccacccgtctgtggctggagggctggattgccagtcaacaaggatggcgcattgatgtcctcgcccacagcctcaatcaactacgccctgaactattcgaaggccgtacattgctggtgtggtgcggtgaaaatcgaacctccgcccaacagcagcaactcaccagttggcaagaacaaggccatgatattttcccactcggcatttaatgattcgttaacaaatgcgctttactgtacaatcctttcgttaacataaggagtgcattatgcgcatagctaaaattggggtcatcgccctgttcctgtttatggcgttaggcggaattggtggcgtcatgctcgcaggttatacctttattttgcgtgctggctaagcgcctgcaccagcctttcaaacaggcggtctgcgatgatcgccgccagtgccaccagtaacgccccctggatcacatacgcggtattaaatccgctaagcccgatgatgatgggcgtacccagcgtgctggcccctaccgtactggcgatcgtcgccgtaccaatgttgataatcacgctagttcgcacgcccgccagaatcaccggagccgccagcggtagctcgaccttacgcactcgctgaccacgactcattcccatacctttcgcaacttctgtcacgctggcatcaatcgctcccagcccggcaagtgtcgcctgcaggacgggcagcacaccgtaaaggatcaaggcgataatcgctggttgcagaccaaagccgatcaccggaacggcgatcgccagcactgcgacgggcggaaaagtctgtccaacggcggcaatagtttccaccagtgggcgaaattccgcgccccacgggcgagtgacagcaattccggcaccagtgccaatgatcaccgcaaacaaactgctaattcccaccagccagaaatgagccagtgccagagctgcaaaactttcttgctgataaacgggtcgtggcagttgtgggaacaaggcagcaaacagcggctggctgtaaggcagccagaaaatcagcgccacaaacagagcaatgagccagaacagcggatcgcgcaacatcttcatacgcttacgcctccaccagcagatcctgaaaatgcagcgtgccgcaaggctggccctgcatgttcaccaccggcagcacctcgcatccccgcgcaacaaacagagagagcgcatcgcgtagcgtcatctcttctgccagtgcctcaccatctgctcgttcttcgcgacgcacgtaatccgccacactacgtaagctaagcaggcgcacacccagttcactacgtccaaaaaactggcggacaaaatcattcgccggacgagtcagcatcgtcagcggattgccctgctgcactacttcaccgtgatccatcaataccagatgttctgccagccgtagcgcctcatcaatatcatgagtgaccagcacaatggtacgccccagcaaacggtgaatgcgcgtcatctcttgttgcaacgcgccgcgcgttaccgggtccagtgcgccaaaaggttcatccattagtaagacttgcggatcggcagccagtgcacgcgccactcccacacgttgctgctgaccaccggaaagctgatgcggataacgctcacgcaaattactctccagccccagtagcgccattaattcgtcgatacgatcgtcaatccgcgcccggctccatttttgtaattgcggcacggtagcgatgttttgcgccacgctccagtgggggaacaggccaatagattgaatggcatagcccatccggcggcgcaactccagtactggcaggctgcgaatttcttctccggcaaagcggatctctccgctgtcatgctccaccaggcggttaatcattttcagggtggtggatttgccggagccagatgtgccaatcagcacgctaaaactcccttcctgaaaattgagattgagatcgttaacggctttttgtgcgccgaacagtttgctgacatggctaaattcaatcattacgtttcaccttcagcagtgcgataagcaaatcgaacagcgcgtcggtaagcaccgccagaacaattaccgggatcacccccagcaacactaaatcaatggcgctgcttagcagcccctggaaaaccagcgcaccaaaaccgcctgcgccgattaacgccgcaatcaccgccatacctacagtttgcaccatcaccacccgcaggctgcgcagaaataccggtaacgccagcggtaactgaacatgcaggaaacgctgcgccccgctcatccccatcgctctggcgctttccagcacatcgcgcgggatctggttcaaaccgactaccacgccgcgcaccagcggcagcaaggcatagagcaccagcgcaatcagtgcgggtgtcattccggttcctgctatgccgagcgtccccagccacggaaaggccgtaaccagcgcggcaagcggcgcaatcaacaggccaaagagcgccacgctaggcacggtctgaatcacattgagcagagaaaaaattgccccctgccgagcagtggaaaagtagcaccagatgcccaacggcacaccaatcactaacgcaggcagcaccgcaccaaacagcaacgtcagatgttgtgccagcgcgtcgtcaaacacatcctgacggttggcgtattctttcattagactgagatcgttaagcgtgccggagtacagcaaccacagcggaataatggcaatctgcatatgcaacaaccagcgccacagcggatgcgtggagattcggcggatggcatcgctacaggccagcaatgccagcgccgcagccagccagaaaccactgccgaggctggtacgcgccagcgcactgccattttgcgccagttgggtcgccgcctttccagctccccacaccagcaatacgaagacgaattgcgccagaatgagtgcacaaatgctgccttttttaccgggaataaaacaggccgtcagccaggcgcaaccaacgcccaccagcatccagatcgtttgcggccacagctgccagagatgacgcccctcaccgctaactaaacgattaggcgcgtaactgataaacggcagcgccgctgcgattgccgtcagcaacagcagcagcgccagaacaggattaatacggaaataagtcacgggaaattacttcgtccaccctttttgtttcaggtagtcggcagccacttttttggcatccagtccttccacagcaatgctggcattcagttgctgcaatgtttttgcatcgaggctggcgaagactggctgtagccactgtgccatttgcggatactccctcaacacgctctcacgcaccactggtgcaggcgcgtagataggttgcacaccttgcggatcgcttaaggtttgcagccccagcgccgctaccgggccgtcagtgccgtaagccattgcagcattaacgccagaggtttgctgggcagcggctttgatcgtcaccgccgtgtcgccaccagccagactcagcaactgatcctgaccgagcttaaagccataggctttttcaaacgcgggtaacgcatcggcgcgttcgataaactctgcgctggctgccagtttgaaggtgccgccctcttgcagataacgactcaggtcggcaaggctagtgagtttatttttctctgccacatcctgacgcacggcgatagtccaggtgttatttgcaggcgcgggcgtcagccagattaacttgttgtgctcgctatcgagctttttgactttctcgtaaccttgctgcgcgtttttccacgctgcatcgttttcatctttaaagaagaaagcgccattgccggtatattccggatagatatccagttcaccggaagtaatcgccccgcgcaccacaggagtcgttccgagttgcactttattcaccgtcggtacgccgtggctttccagcacctgcaaaatgatattgccgagtagcgcaccttcggtatcgattttactaccgactttaacgggggaagccgcctgtagcggcaggctcacggctgccaacataaccagactacctgcccagagctttaagagtggcatgatgctttcctcattcttttactgttgttttcagcgaattaagagaaaagcatagttgataatggcggggttagcttgagcggaaggattcagttgcagaatcagataaatacttaagaggcatattcggtccggcgtttcctgccggatgcggcgcgagcgccttatccggcctacaaagggcgcaaacgtcgcgcccttactaaagcattacagcaactcaaactcgcctttcttaacgcgtgcggaatcagtgccgataaagacattgaacttgccaggctcggcgtcatatttcatctgttgattccagaacttcagcgcctcaatatcgatcgggaagctgacagtctgagtttcgcccggtttcagggtgattttctcaaagcctttcagctgtttcacagggcgactcatggaagccgtcacatcctgcaagtacatctgcactaccgtggcaccctcgcgcttaccggtgttcgtcacctgcacgctggcagtcactttgccgtcacgcttcatggtcggcgcagaaagtttcacatcagagacggtgaaagtggtgtagctcagcccatagccgaacggatacaacgccccgttagcttcatcaaaataacggctagtgtatttgttcggcttgtcggcattatacgggcgaccggtattcagatggctgtagtacaccgggatctgcccgacagaacgcgggaaggacattggcagcttgccggacgggttgtaatcgccaaacaatacatcggcaattgcattaccgccttcagtccccgcaaaccaggtttccagaatcgcatcagcctgctgatcttctttcaccagcgccagcggacgcccgttcatcagcaccagcaccagcggtttaccggtggctttcagcgccgcaatcaagtcacgttggctttgcggaatagtgatatcggtccggctggaggcttcgtgcgccatcccctgtgcttcaccgactacagccaccaccacatcagattgtttcgccgtctgcaccgcttcatcaatcatctcttgcgggctacgcggatcgactttgaccgcttcttcatactgattcaggaaatcgataatgcctttgtcactggtaacgttcgcccctttggcatacagcactttaccgttttcaccgacggcatttttaatcccggtcagtacggtcacggattgatcggcaacaccggctgcggaccagctgcccatcacgtcacgtttactgtccgccagtggcccaaccaccgcaatggtggcgctttttttcagcggtaacgtttcgagacggtttttcagcaacaccaagctttcgcgcgccacttcacgcgcttctttacggtgcaggcggctttcggcattggtatccaccgggtcagactctttcggccccaaatggctgtatgggtcgttaaacaaccccatatcatatttaacgttcagtacatggcgggcagcatcgtccagctctgccatcgtcactttgccggatttaatcaacccaggcagatacttgctgtagtactcgtcgctcatgctcatgttgattccggatttcagcgccacgcgcaccgcatcttccgggtctgccgccgtgccatgtttaatcagctctttgattgcaccgtgatcggaaacggtgatgcctttaaagccccactggtcgcgcagaacatctttcagcagccaggaatcggaggtggctggcgtgccgttcaggctgttcagcgccaccatcaccgcgccgctgcctgcgtccagccccgctttgtacggcggcatataatcattaaacaggcgctgcggactcatatcgacggtgttgtactctttaccgccttctaccgcgccgtatgcggcaaagtgtttgacgctggtcatcacgctgtagcgatctgccgggcttttaccctgcatcgcttccaccatggttttacccattgtactggtgagatacgtatcttcgccaaaaccttcggaagcacgtccccagcgcggatcgcggctgacatcgaccatcggtgcccaggtcatattcaggccatcatctgccgcttcataagcagagacacgtccgaccgttttcactgcatcgaggttaaaagagctggccagaccgaggctaatcgggaacaccgtgcgctgaccgtgcagcacgtcgtaagcaaagaaaagaggaattttcaggcggcttaattccatcacctgatcctgcatggcgcggatatcctgacgggttacggtgttgaaaatcgccccaacctgaccgtctttgatcatctcgcggatcgcctctttcgggttatccgggccgacgctgattaagcgcagctgaccaattttctcatcaactgtcattttcttaagcagttcggtgacgaacgcatcccgcgcttcgggcgttaatggatggttgccgaataaatcatccgccagtgctggctgcagggccagactcaccgcgattcctacactacatagccatttcatatggatttttcttcctttgttgcccgacgtggcagcgaaaatggtgcaaaaaccgtagtttgccataagcatgatggagagagaaaaagaatgctcagtttattgtctgaattttcaaaatattcactcgctgaattgttatacaaggcgctattctagtttgtgatattttttcgccaccacaaggagtggaaaatgtcttccatgacaacaactgataataaagcctttttgaatgaacttgctcgtctggtgggttctagtcacctgctcaccgatcccgcaaaaacggcccgctatcgcaagggcttccgttctggtcagggcgacgcgctggctgtcgttttccctggcagtctactagaattgtggcgggtgctgaaagcctgcgtcaccgccgacaaaattattctgatgcaggccgccaatacaggcctgaccgaaggaagcacgccaaacggtaacgattatgatcgcgatgtcgttatcatcagcaccctgcgtctcgacaagctgcacgttcttggcaagggcgaacaggtgctggcctatccgggcaccacgctctatagcctggaaaaagccctcaaaccgctgggacgcgaaccgcacagtgtgattggaagtagctgtataggcgcaagcgtcatcggcggtatttgtaacaactccggcggcagcctggtgcaacgtggcccggcgtataccgaaatgagcttattcgcgcgtataaatgaagacggcaaactgacgctggtgaaccatctggggattgatctgggcgaaacgccggagcagatccttagcaagctggatgatgatcgcatcaaagatgacgatgtgcgtcacgatggtcgtcacgcccacgattatgactatgtccaccgcgttcgtgatattgaagccgacacgcccgcacgttataacgccgatcctgatcggttatttgaatcttctggttgcgccgggaagctggcggtctttgcagtacgtcttgataccttcgaagcggaaaaaaatcagcaggtgttttatatcggcaccaaccagccggaagtgctgaccgaaatccgccgtcatattctggctaacttcgaaaatctgccggttgccggggaatatatgcaccgggatatctacgatattgcggaaaaatacggcaaagacaccttcctgatgattgataagttaggcaccgacaagatgccgttcttctttaatctcaagggacgcaccgatgcgatgctggagaaagtgaaattcttccgtccgcattttactgaccgtgcgatgcaaaaattcggtcacctgttccccagccatttaccgccgcgcatgaaaaactggcgcgataaatacgagcatcatctgctgttaaaaatggcgggcgatggcgtgggcgaagccaaaagctggctggtggattatttcaaacaggccgaaggcgatttctttgtctgtacgccggaggaaggcagcaaagcgtttttacaccgtttcgccgctgcgggcgcagcaattcgttatcaggcggtgcattccgatgaagtcgaagacattctggcgttggatatcgctctgcggcgtaacgacaccgagtggtatgagcatttaccgccggagatcgacagccagctggtgcacaagctctattacggccattttatgtgctatgtcttccatcaggattacatagtgaaaaaaggcgtggatgtgcatgcgttaaaagaacagatgctggaactgctacagcagcgcggcgcgcagtaccctgccgagcataacgtcggtcatttgtataaagcaccggagacgttgcagaagttctatcgcgagaacgatccgaccaacagcatgaatccggggatcggtaaaaccagtaaacggaaaaactggcaggaagtggagtaaaaattacggatggcagagtatcgccatccgaattcacttaatcgttctgtgccgtctgccccgccgccgccatttgggcggctttttgttttttatagctcaacgctgctgccggcacaggcatcactttaccggtttcaatccaggtacgcaggcggctggcatcggcaaaatgggtatatttgccaaacgcgtccatcactaccagcgccaccggtttattattgataaccgtacgcatcaccagacaatggcccgccgcattggtaaagccggttttggttaactgaatattccagttatcgcgatacaccagatgattagtattgcggaacggcagcgtatacgtcggattagagaaggttgccatatcttcccgggtagtacttaactgcccgatcaacggatattgtttgctggcaatgagcagtttggttaagtcacgggcagtactaacgttatgcacgctcaatccggtaggttcaacaaagcgcgtgttgttcattccgaggcttttcgctttcgcattcattgccttaataaaggctttgtaaccaccgggataatggtgcgcaaggcttgccgccgcgcggttttcactagacatcagcgccagcaacagcatatctttacggctgatttcgctattcagtcgtacgcggctatagacccctttcatctccggcgtctggctgatatccacttttagtttttcatccagcggcagtcgtgcatccagcacaaccatcgcggtcattaatttgctgatagacgcaatcggacgcaccagatccgggtggttgctatagatcactttgttggtattcagatcaacaatcatcgcgctaccggaggcaatttccggttgactagcggtggtagcggctgccgttttcgcaacggcctgcggtgcaaaaggcacagccagcatcagggccaggctaaataaagaaactcgaaatttcggcatgatgagcattcagatagtggttcacgcgcacgggttgcgcaccgccggagtaaggatttactgaggctagcgacgccatcataacgagcaaaaagtgcgatcgtcaaaggagaatcgtgaggaaatgctgcattgctgacatttacgccagcaatgcaacgtcaaagaactttttagaacaaacgataaccgtagccccatagtataacggttagggcgagcagcacttccagtaccagcacgccaatcgccagcgtgctactagagaagctaaggccttcctctttgttgatattcaggaagctcggaataccaaggtaaagcaggtagccggtgtaaaacagcgccaccgtgccgaccagcgcacacaaccagaccagtggataaagcgccaccagaccgcttaaaaacagcggagttgcaacgtagcccgcgaagaccatgcagtgcgcaagactcggacgctgcggataattacgcgccatccaccagatgacccgccccatcaccgcgaccccagccagcataacgccgtaaaacaagacagccagcgccagtccggtaaaccaggataacttcaggatagtgccatcgccaaaattccagccaatctgtgtagtgccaatgaaggcgcaaatcaccggaatcgccgccatcagcaaaacgtggtgggtgtaatggtgagaaatcgtttcgttttcgcgattaatcacctgcatttcacgatcgggatgggaaaacagtccccagacatggctcataccgcccccttgttgtgagttcatgaacctgacagttcaagtataagtcagcttgtgattattttttgttcgcccatgtaattttcactgtctgatgaacgtcctttttcagcgtgaatgattcacagggtgtatgcttactggcaaccaaagggagacagactggcctatggatctcaatacacttatcagtcaatatggttatgccgcgctggtgatcggtagcctggcggaaggtgaaaccgtgactttgctgggaggcgttgcggcgcatcaggggctattaaagttcccgctggtggtactttctgtggcgcttggcggcatgattggcgaccaggtgctctatctgtgcgggcggcggtttggcggcaagctgttacgccgtttcagcaaacatcaggataaaattgagcgggcgcagaaacttatccaacgccatccgtatctgtttgtcattggtacgcgctttatgtatggctttcgggtgattggcccgacgctgattggtgccagccagctgccgccgaaaatctttctgccgctgaatattctcggcgcatttgcctgggcgttgatttttaccactattggttacgctggtggtcaggtgattgcgccgtggttgcacaatctcgaccagcatttgaagcactgggtctggttgattctggtcgtggttctggtggtgggcgtgcgctggtggctgaaacgacgcgggaagaaaaagccggatcatcaggcgtaaaaccattgccctggataaggcgttcgcgccgcatccgacatccggagtaccatgcctgatacgacgcttgtgcgtcttttcatgccgaccaaaatattacccaatgaaatatccacgcacctcactgcgttattctgggttgaactgtggattcgccaacataaagccgccatccactatcaagctctgcccggtggtgtaatttgcgccctcgctacaaagccacaccaccaggctggcaatctcatgcgttgcgccaaaacgccgcaagggaatgctaggctccgcgtcgggcttcacgtcgctgtcatccatgccattcattggcgtggcgatcgccccaggcgcgactgcgttcaccaaaatcttatgcctgaccagctccagcgccatcgctttggttaacccaccgagcgcatgtttagcggctgtgtaggcgctggcatccggcagcggcgtatgttcatgtacgctcgtaatgttgatgatgcgaccgccctgcccttgtttcaccatctgacgagccgcaatttggctgcataagaatgcaccatcgacatcaacggtaaaaatcttgcgccactcatcaaaagccatatcaagaaacggcgctttggtcattgcacccgcattattcaccagcacatcaatgcgccccagccgttgaatgagtttctccagcgccagtgccccttctggtagattgccgagatccagctgcacgatctccgcacgtacgccgtggctaactacctcacgcgcggtatcttttgccccttcttcatcactgtgccaggtaataccaatatcaaacccctgctgcgccagtaataacgcgcactctttgccgatcccgctatcggaggcggtaataatcgcaacctgtgccatcgagttctccacttaacgctgaataaacgttaagtatagaaggcgcatatcatcagcgtttgtaccccccgcccaacgcaccagtgagttgaatggaggcatccagccactgcccttgcaataacaggccattggcccgctcacgcagcgcggggattctggcttcgctgacgcgggaaccagcaatgatgcccgcgttaaagcgcgcctgcgcaagacctaccacacgcaaggcatcgcgctcaatttgcgcctgatgctggtttttctccgccagtgtctgaacctgactggctgcccgcgccacgtcattcaccgcttcaaccaccgctttgttgtagctggcgatagacaagttgctttcggcttttgcgatatcgagattggcgttaagacgaccactatcgaaaatgggtagcgtcaggcctgccgtaacgcccatttgctgcgcggaatgacggaacagatcgcttaagtgcaacgcatcctgttgcaggaaggccatcaggttgatgtcaggataaaatgccgcttttgccgcatcaatggtgcttaggctactctcaacgtaccagtgcgccgcctgcaaatctgcccgccgggccagtaaggagtaccccagttcatcaggaagctggcttgccactttcggcaacgcgaccggtttaagcttcaaactctttgtctggttatttgtaagtgcgcttaaccgtgcctcaataattttcattttccccgcgacatcgttgagctgctgccgggttttgctggcattaatatcggtttccacaccttcaacactagaagtaatcccgttctgatatagctggcgatcggtcgcgataatggtgttctgctctttttctatttgctgcaagaccgtgtttaacgccgcctgggtttgccactcccagtacaggcgggctacgctgccagccagcaattggcgggtttgctcgcgttccgccgcccgtgctttaaccgtacccaggcgggcagtaacctccgcccgattctttccccagatatcgagatgccagcccgccgttaagccaaaagtaccgttggtgtaccacgggccggtcgtacctgcggccggatcgttcagagcaaacggccccattaagccttctgcgctcattttttgccgctccatatccgccgaaaagtcgatctgcggaccatcctgagtggcaactgccttcgcctgggcttcagctagctgaatgcgctgttcagccacctgcatatccggtgcgttctgtagtgcattgttaattaaggaagactgttgattatcgtgatactccagccaccattggctgtctggccaaccattttcagcgccgtgggtaatgcggtgtcaacttgtgcagcgggcgtttgctggcttaacgcctggcgggtttcatgcataggcgcacacccggccagcatcagtaacagcggaaaacaggcgatggctggataaaaggaatcacgattcatgggggaataatcaggtaagaaaaggtgcgcggagattaccgtgtgttgcgatatattttttagtttcgcgtggcaatacatcagtggcaataaaacgacatatccagaaaaatatacactaagtgaatgatatcttccgatttatcttaatcgtttatggataacggcaaagggcttcgttttttcctatacttattcagcactcacaaataaaggaacgccaatgaaaattatactctgggctgtattgattattttcctgattgggctactggtggtgactggcgtatttaagatgatattttaaaattaattaatgtcatcaggtccgaaaataacgagaatatttcagtctctcatcctgttgcgctcctgtcatgtgcattgcttcatataatcactggcgcaaggagcgcgcagggggcggccaatcgccgccgccccctgcacccccgggctctggcgaacaaaatcgccgctgcgcggtgccctcggcttatcccttacggctaccgggtcgggcgcgaggtaacatccctgtaaaacgcgccctcagcccacatccatgtgggctgccccggccttcagggaacgcctcggcaattttgacgccaccaaacaaccgtgcggcctattgataaagagctaacacattgtcaaaaaacatcactatggttttttagagtttctcgatatcaattgcctgaatagcccttgcaatatcaggggaattattcaacacccgaacatgctgaaataattccgttgcttcatcgtattctttacgcaaataactcaaccactgtttaatccgcgcaacgtgatataacccggtatcgccctgcttttccagacgggtatatttttgcagcaaagcaaccacctccggccacggcattcgcggttcgttatattttaccacccggctcaggttgggaatattgagcgccccgcgaccaatcatcactgcgtcgcagccgctgatcgccatgcattgttgcgcgctctgccagtcccagatttcaccgttggcaatcaccggaatattcagccgctggcgaatatcgccaatcgcctgccagtcaatatgctccgcgcggtaaccctgctctttcgtccgcccatgcaccaccagctccgtagcgccagcctgttgaaccgcatcggcgatttcaaatttcttctcaccgctgtcccagcccagacgcactttcacgctgacgggcaaatgcgccggtacagcttcacgcatcgcttttgcaccctggtagatgagttcaggatctttgagtaacgtcgccccgccgccgctaccgttaaccgttttgctcgggcagccgcaattgagatccacgccccaggaacctaactccaccgcacgggcggcgttctctgccagccattgtgggaactgacctaacaactgcacgcgcaccagcgtaccagatggtgtccggctggcgttttgtagctcagggcaaatgcgatgaaagacttttaccggcagcagttgatccaccacgcggacaaactcggtgatgcacagatcgtagtcgttaacttcggtcagcaattcacgcaccagagagtcaagcactccctccatcggtgccagtaacacacgcatatcatcacccgcaaaaaaatgaggcgctatgttagcgcctatggtcagcggattaaaggtctgcaaagagggattgctgcaaactgcaatccctctctatgcttgatgtatgcctgagttcgctgcgcattgcgtaatgccggggagcgaaaaaataagcgctgatttcttaatgtgatcggtagcacgttttacgaattaattgtatgatgaatccatctcatctggggtgttgattatgagtaagacactgaacattatctggcaatatttacgcgctttcgtcctgatttatgcctgcctgtatgcaggcattttcattgcttccctgctaccggtaaccattccgggcagcatcatcgggatgctgatcctgtttgtcctgctggccttgcaaattcttccggcaaaatgggtcaatccggggtgctacgtactgattcgctatatggcgctattgtttgtgccgattggcgtaggcgtcatgcaatattttgatttgctccgcgcacagtttggcccggtagtggtttcctgtgcagtcagtacgctggtggtttttctggtggtgagctggagtagccaactggtacacggtgaacgtaaagtcgtaggtcagaaaggaagtgaagaatgatggcgaatatctggtggagtttaccgctgacattgattgtcttttttgccgcccgcaaactggcggcacggtataagtttcccttgcttaacccgttgctggtagcaatggtggtgatcattccttttttaatgctgactggcatctcttacgacagctactttaaaggtagcgaagtgctaaacgatctgctgcaaccggcggtcgtcgcgctggcctatcctttatatgagcagctacaccagatccgcgcgcgctggaaaagcatcatcaccatctgttttatcggcagcgtggttgcgatggtgacggggacttccgtggcattgttgatgggcgctagtccggaaatcgccgcgagtatcctgccgaaaagtgtcaccacgcctattgcaatggcggttggcggcagtattggcggtattccggcaatcagcgcagtttgcgtgattttcgtcggcatcctcggcgcggtatttggccatacattgcttaatgcgatgcgtattcgtaccaaagctgcgcgcggtctggcaatggggactgccagccacgccctcggtacggcgcgctgcgccgagctggattatcaggaaggtgcatttagtagcctagcgctggtgttatgcgggataattactagcctgatcgcaccgttccttttcccgattattctggcagtaatgggctaaaatttgcgatgcgtcgcgcatttttgatgtatgtttcacgcgttgcataattaatgagattcagatcacatataaagccacaacgggttcgtaaactgttatcccattacatgattatgaggcaacgccatgcatccacgttttcaaaccgcttttgcccaacttgcggataacttgcaatctgcactggaacctattctggcagacaagtacttccccgctttgttgaccggggagcaagtcagtagcctgaagagcgcaacggggctggacgaagacgcgctggcattcgcactacttccgctggcggcggcctgtgcgcgtacgccattgagcaattttaatgttggcgcaattgcgcgcggtgtgagcggaacctggtatttcggtgccaatatggaatttattggtgcgacaatgcagcaaaccgttcatgccgaacaaagcgcgatcagccacgcctggttgagtggtgaaaaagcgcttgcagccatcaccgttaactacacgccttgtggtcactgccgtcagtttatgaatgaactgaacagcggtctggatctgcgtattcatctgccgggccgcgaggcacacgcgctgcgtgactatctgccagatgcctttgggccgaaagatctggagattaaaacgctgctgatggacgaacaggatcacggctatgcgctgacgggtgatgcgctttctcaggcagcgattgcggcggcaaaccgtagccacatgccttacagtaagagcccaagcggtgtcgcgctggaatgtaaagacggtcgtattttcagtggcagctacgctgaaaacgccgcattcaacccgactctgccaccgttgcagggagcgttaattctgttgaatctcaagggttatgattacccggatatccagcgcgcggttctggcagaaaaagccgatgcgccgttgattcagtgggatgccacctccgcaacgctgaaagctctcggctgtcacagtatcgaccgagtgcttctcgcttaagcctggtgccggatgcggcgtgaacgccttgtccggcttgccagccctctcctggtgtcgaaattcccggcaaacagtttgccgtttcttgcgcaaaaccagcgggtaaagtagcctgatggaaattttccttagatcgagtctcctgcatgttaaagcgcgtgttcctcagcctgttagtcctgatcggcttgctgctgttgactgtgctcggcctcgatcgctggatgagctggaaaaccgcgccttatatctacgacgaattgcaggatctcccctaccgccaggtcggtgtggtgctcggaacagcaaaatattatcgtactggcgtaattaatcagtattatcgctaccgcattcaaggagcgattaatgcctataacagcggtaaggtaaattatctattactgagcggcgataacgcattgcaaagttataatgagccgatgaccatgcgcaaagatttaatcgctgctggtgtcgacccaagtgatattgttctcgattacgcaggctttcgtacgctggattccatcgtgcgtacacgcaaagttttcgatactaatgatttcattattatcacccaacgtttccactgtgagcgagcattatttattgcgctgcatatggggattcaggctcagtgttatgccgtaccgagtccgaaagatatgctgagtgtacgtattcgtgaatttgccgcccgtttcggtgcgctggctgacctttatatttttaaacgtgaaccgcgttttttagggccgctggtccctattccggctatgcaccaggtaccggaagatgcgcaggggtatcccgccgtcacacccgaacagttacttgaattacaaaagaaacaaggaaagtaattatggatgtacagcagttttttgtcgttgccgtttttttccttatcccgatattttgtttccgcgaagcatggaaaggctggcgcgcaggcgcgattgataaacgggttaaaaatgcaccggaaccggtgtatgtctggcgagcaaaaaatcccggactctttttcgcttatatggtggcatatatcggcttcggaattttatctatcggcatgattgtttatcttattttctatcgttaatattcccctctccagttaattattgagaataattattacttcacctgataagctgcggatatcacattcctaaccgcagctatttgtgaatcttttcacagtttaaattcccccgcacgcttagccttaatatcagtacattattatttactaaacgctcgccttaattacctatagcattaaggaagatcacatgccgcaacaaaattatctggatgaactcactccggcttttacgtctttactggcgattaaagaagcctctcgctgtttattatgtcacgacgctccctgtagtcaggcttgcccggcacagaccgatccggggaaatttattcgcagtatctactttcgtaattttaaaggcgctgccgagacaattcgcgaaaataatgccctcggtgccgtttgtgccagagtgtgcccgacggagaaattatgccaaagcggttgtacccgtgccggtgttgatgctcccattgatatcggccgcttacagcgttttgttactgattttgaacaacaaaccggaatggaaatttatcagcccggtactaaaacgctcggcaaagtcgcgattattggcgcaggtcctgccggattgcaggccagtgtgacactgacaaaccagggttatgacgtcacgatttatgagaaagaagcgcaccccggtggctggttgcgtaacggtattccgcaattccggttaccgcaaagtgtgctggatgcagagatcgcccgtattgaaaaaatgggcgtgaccattaagtgcaacaacgaagtcggtaacacactcacccttgagcagctgaaagcagaaaaccgcgcggtactggtcaccgtggggttaagtagcggttccgggctaccgctgtttgagcatagtgacgttgagattgccgtcgacttcttgcaacgtgcacgacaggcgcaaggcgatatcagcattccacaaagcgcattaattatcggcggcggtgatgtcgcgatggacgtagccagcacgctgaaagttctcggctgtcaggcggtaacttgcgtagcgcgtgaagagttagatgagtttccggcaagcgaaaaagagtttaccagcgcccgggagctgggcgttagcatcatcgatggattcacgccagtagccgtggaaggcaataaagtcacgtttaagcatgtacggttaagcggcgaactgacgatggcggcagataaaattattctcgccgtcggtcagcatgccagactagatgcctttgcggagttagagccgcagcgtaacaccatcaaaacacaaaattaccagacccgcgacccgcaagtctttgctgctggcgatattgttgagggtgacaaaaccgtggtctatgccgtgaaaaccgggaaagaagccgccgaggcgattcatcactatttagagggagcttgcagttgttaaattaatatttagagggagcttgctcatgttaacgaaagatcttagcattactttttgcggcgtgaagtttcccaacccgttctgcctctcttctagcccggtaggcaactgctatgagatgtgtgccaaagcctacgacacaggttggggcggtgtggtgtttaaaacgatcggcttttttatcgccaacgaagtcagcccgcgttttgatcatctggtgaaagaagataccggttttatcggcttcaaaaatatggagcagattgctgaacatccgttggaagagaatctggccgccctgcgtcggctgaaggaagattacccggacaaagtattgatcgctagcatcatgggggaaaatgagcagcaatgggaggagctggcgcgcctggtgcaagaagctggcgcggatatgatcgagtgtaacttctcctgtccgcaaatgacttctcatgcgatgggtagcgatgtcgggcaaagcccggagctggtagaaaaatattgtcgggcagtgaaacggggttccacgctgccaatgctggcgaagatgacgccgaatatcggtgatatgtgcgaagtggcgctggcggcgaagcgcggcggcgcagatggcattgcggcgattaacaccgttaaatccatcaccaatatcgatcttaatcagaaaatcggtatgccgatcgttaacggaaaaagcagtatttccggatattccggtaaagcggtaaaaccgatcgccctgcgcttcattcagcaaatgcgcacccatccagaactgcgcgatttcccaatcagcggtatcggcggcattgaaacctgggaggatgcggctgagtttttattgctcggcgcagcaacgttacaggtgaccaccggcatcatgcagtacgggtatcggatagtggaagatatggcaagcgggttgagccattatctcgccgatcagggatttgatagcctgcaggagatggtaggtctggcgaataacaatattgtcccggcggaagatttagaccgcagttatattgtctatccccgtatcaatcttgataaatgtgttggctgtggacgctgttatatttcctgttacgacggcggtcaccaggcgatggaatggagcgagaaaacccgcacaccgcattgtaataccgagaaatgtgtgggttgtctgctttgtggtcacgtctgcccggtgggttgtattgagctcggggaagtgaagtttaagaaaggcgagaaagaacacccggtaacgttgtaaaaccagagacgcatccggcatttggttcctgtcgccggatgcggcttgaacgccttatccggcctacaaaaccatacaaatcagtatgttgagcttattgtaggccggataaaacgcgccagcgttgcatccggcatttggctcctgttgccggatgcggcgtgaacgccttatccggcctacaaaaccacacagatcatgatgttatgtgcgtttatgaccgaatgcggaccacattcacatcatttcttacgcgcgtatttcagactatccagcgctacggcgaagataataatcgcccctttgatgatgtactgccagtatgggtttacgccgatatacgtcaggccatagttgatgacggtaaaaataattaccccggtcaccacgccaatcaccgtccccacaccgccgctgaagcttacaccgcctaccacgcacgccgcgatagcatccagctcatacataaagccgaggttgttggtggcagagccgatacgtccggcttctaacatcccgccaaaggcatagaacacgccagacaacgcgtagatcatcagcaggttcaggccgacgttgacaccagatacttttgccgcttccgggttaccgccaatggcaaaaatgttcttaccgaagcgggttttgttccacaacacccagacgaacgccaccgcaatcaacgcgtagaaggtgatgtaagagagacggaaactccccagcgcgacaaagccctgagcaaaggtagagaagccactgtcaaaaccagaaattgggctcgccccgacaaagtcgtaatagaggctgttgatgccatagacgatgatcatcgtgccgagcgtggtaatgaacggcgtcacgttgagataagcgataatcagaccgttgatcaaaccgatcaccgcaccaatggcacagacaatcagaataaccagcgcaatcggcatcgtcgccatttccgggaacactttgttggcgttatccatggactgcaataatgtcgcagccaccactgccgccagccctacctgacgaccagcagaaagatcggtcccctgggtgacaattaaccctgccacaccgagcgcgataataatacgcacgctactctgggtgagaatattacttaagttcaacagacttaaaaatgttgggtcctggaaaataataatcgccagcaaaactaaaagaacgacgtaaataccgccctctttcaggtaagtaagaaaacttttcttatttaacgcactcatgggaagcccctaatcttaaaggtgcaaagacgcaagacgcagaatttcgttttgcgttgttgtttttgtatcgacaattccggaaacgagaccattgctcatgaccagaatacggtctgttatccctaacaactcaggcatttcagaggagataataataatccccttgcctttcttcgccagttcggcaattaactgataaatttcaaacttcgccccgacatcaataccgcgcgtcggttcatcgagcattaatatttctggttgcgttagtagccagcgaccaataatcaccttttgctgattaccaccggagaggctaccaatttgcgtccgatgacccggcgtttttacccgcatgctatcaatcacccactgggtatcgcttttcatccggctgttatccagtaaaccaactttatttttgtagttgcgaatattggaaattaagctgttaaaaccaatatccagataggcataaattcccgtactgcggcgctcctcagttaccagtgcaaatccatggtttatggcttcgttggcattatggttattgatctgtttgccgtgcaacgttatggtgccagcgcttttctcgcgaataccaaataacgtctcaacaatatcggtacgtttcgcccccaccagaccggcaataccgaggatctcccctttatgcagatcaaagctgacatcgcgaatgctcggctggcgcagactcgtcaggttacgtacctcgaggatgacttcgcccggtttgttttctttgtcagggaaacgctggttaagagaacgcccaaccatcatggcgatgatcttgtccatcgtcagtcctgccagcggttcggtggcgatccactgaccgtcgcgcaatacggtaacttcatcacataactggaagatttcttccattttatggctgatataaacaataccgcagccgcgctcttttaatttacgaataatagtgaacagatgattgacctctttttcggttaagctagaagtcggttcatccataatcacaattttcgcgttataggaaaacgctttggcgatttcgatcatctgcatttggctaacggataatgtgccgacgcgcgcacgcggatcgatatcaatatccagttcgtcaaaaatcgctttggtttcgcggtacattttgtcctgatcgacaaacatgcctttggtgggatatcgccccagccacatgttatccatcacgctacgttgtaataccaggtttaactcctggtgtaccatgctaataccattttccagggcttcttttgcagaatggaaatcgatctctttaccctggaataaaatggtgccggagtctttttgataaataccaaacaggcattttaataatgtgctttttcctgcaccgttttcccccattaatgcatggatagaatgtggccggacttttaaattaacgttatcaagtgccttaacaccaggaaaggacttgttgataccgctcatttccaacaagtattccccggaggacggagtcgtactgctgaccatataattttaccttgttggccatacaataagggcgcagtaatagactgcgcccaatcagtcttatttcttgctgaattcagccaggttgtctttatctacgccaacataaggtacgcggaccactttgttgtcgattttccagttggtgccatcagccgcacctttaccatcggccaggtttttcgccagatcaaaggtcgctttcgcctggttgttagcatcgttcagtacggtgcccgccagtgcaccggatttcaccagcgccagcgcttctggcagcgcatcgacgccaaacaccggaatgctggacttgttgtgtgctttcagcgcttcaaccgcgcccattgccatcgcatcgttgttggcgataaccacttcgattttgttggcgttcgggccagacagccaggcgtccatcttatctttcgcctgagcggtgtcccacattgcggtatctaactgtaactgttcagttttgatgcctttatcgttcaattctttaatcacgtaagtggtacgtgcttctgcatccggatggcccggttcacctttcagcagtacgaactgaatctgaccgtctttgttcagatcccaaccctgattcgccgcccagtgtttagcaatcaaatcgccttgaataatgccggactctttggagtcagtgccaacgtagtaggctttgtcgtagctatccagcgccttacgagacggttctttgttgaagaaaaccaccggcacgttttgcccacgcgctttctcaatcaccgtacccgcagctgccgggtcaaccaggttgattgccagtgccttcacccctttcgccagcaatacgtcgatctgatcgttctgcttggactggtcattctgagaatcattcatcagcagctgaacatctggcgcggctttcgcatcttgctcaatagccttgcgcactacagacataaagttatcgtcgtacttatagattgttacaccaatgcgagtatcagcagcgtgtgcagcggcaccgaataacatgctggccatcacagcagacagggttaacaccttcttattcatggtatctccggtttttcttatgcagggtagtgcttgagataaatgctcggcggggcagtagagttaatgaagtgttactgaacgccgaagctcactttttaaaattcgttcttccatgcccggtaacgctccagaaaacggctttaattgttgttatgacgctgttacctcggcaaaagtgattattcactgttacatacgggttacaacgttaaaacggtgcaatcatagctatcacattgttaagatactgtgaaatcactcacagattgaaagcggttacatcgcctgatttgtactgttagtgatcgccgccgcattctggcgtgttgcgacagaatggcgacgcactaacgtcggcataaaacagtggctggcacgaggatcaatattgcctgctgccccctgcaaggccagttcggtggctaatttcgccatactagcaatgggataacgcacggtcgttaattgcgggtcggtgtaacgggcgatgggaatatcatcgaaaccgatgatactgagatgtaacggaatcgcaatgccattatcttttaatgctgtcagtgcgccagcggccatattgtcgttataagcaaatacagcggtaagttgtagattgcgccccagcagttcaaccatcgccgcctcaccgcccggcatgtccggcgtaccagcgccaatccagctttccggcggaataatatcctgctctttcaacgcactcatccagcctgctttacgcatggcgtcatcttcaatgccgtggctggaagaaagataaccaatacgttgatgaccgttattcagcaacatgcgcgtcgccattcgggcaccgctgagattatccaggcaaacgcaacgatgggcgtaccccggcacaacgcggttgattaacaccataccgggaatgttatccataaattgcgccagttcatcgtcactcaatgctttactgtgaacaatcaacgcattacaacgctggcgaattaacacctcaatggcgtgacgctctttttccgcttcatgatagctattgccgattagcacgtatttctgatgctgctgagcgaccagatccaccgcttttaccagcgcgccgaaaaacgcatcagaaacgtccatcaccaccacgccaatggtgtcgctaacctgagttgccagcgcctgggcattggcgtttggccgataatccagctcactcacggctttcattactgcttcacgcgtgtcggcactgaccagcgtgctgttattgagcacccgggaaaccgttgccacagagacgccagcctgacgcgctacatcacgaatggtgatcatattcactacctgttatgagattgcagtaaatgactgcttgctggcggctattttgtcagcactgaatacaggacttcgtgaatcgagtcacagcaatggaaacggttacagccgttttgttaacgaatgtgatccagatcgttatctacttgttttagatattgccggtccggcagcacgcaaagttaactgacgccagagccattccaccggcccctggcggaagtaacgcagccagataacagagaagaggatattcgccagccataccggaataacaaacgccagcagctccaggcggtcaaaatgcataaacaaaccgaggtggtaaaaaagcgtggtacaaatcagcgtttgcaatagatagttggtcagcgccatccgtccgacgcaggcgatcgcaagcaccagcttaaagcggctcaattgcggccagaagccataaaacaggctcgcatagccaatcgcctgaaacggcgcactcagttcccgcggcatttgaagtaagaaggcacaccagcgatacgcccagtccagctgccattgcagggcgatggcaggaaggttaatggtcaccccaatcgccaccagcacaaaaccagtacgacgatagtgacgtaagctgaactgccctttcagccagccgctgcgcatcagcgccgcaccaatgagcatcatccctgccagttgccagccatactgtgcgcccagtgccagtaaactgttgccaacaccatcggcacgattactgatcgcttcaacgccgccgtgaagcttccagtatttttcatacaaaatagcgcttgcatccggcgtccaggcgcggctggtctggctgtcggaaatcagccccaataacagcaaaacgccaagccccaccagataaagcatgacgcctgtattaaacaggctttttacgcttggcgcatcgcgcaccagccgccagcagattaagcccaccagcccgtaagccagcaaaatatcgccgtcccagaacaataaaccgtgaataaagcccaacaagactaacagcgttaaccggctctggatccagcgtctgccacggggcagcaacatttgcaggcccgcaccaaacagtagcgcaaaaagcgtgaggaatttcacctggccgatgagatcaagaaatgcccaagtccatgcatcccgcggcgtaatagcaccgtaccaggcgggattgagataagccgcctttggtagcccaaaggcgctgatgtttaatagcaggatccccagaatggcgacgccgcgaacaaaatcgagcgtgacgttgcgctccatggttcctgccttttaatcagttgtgatgacgcacagcgcgcagaaactcgtggcgcgtattctgactggatttgaacaatccaccaagagaggtcgttgtcgtggcactggttgcatcgcggatgccacgcgccttcacgcagtaatgcaccgcgtcgatgctgacagccacgttattggtgcccagcagcgtttgtagcgcaataagaatttgctgcgtcagacgttcctgcacctgcggacgctgggcaaagaactgcacaatgcggttaattttactcagaccgatcacgctatctttcgggatataggccaccgtcgctttgccatcgatggtaacaaaatggtgttcacaggtgctggtcagagtgatatcgcgcacggtgaccatttcatcgaccttcattttgttttcaatgagggtgattttcgggaaattggcgtaatccagaccggagaaaatttcatcgacatacattttagcgatgcgatgcggcgtttccatcaaactgtcatcagccaggtcgagattcagcagctgcatgatttcggtcatatgaccagcaataaggcttttgcgcgtttcgttatccatttcatgcacgggcgggcgcagcggtgtttccagtcctcgcgcaactaacgcttcatgaaccagggccgcttctttactgagacttggcatttatgatttctcctgcaggtgtgacgcctccgccctgcgtgggggcaaagttattaagctgatttacagcctgattattgtgcgtgaggcggcgcacataatccagtattcacagcgataattattgtaattgccgctgcctttcatcagcagatgttaaaacatcgttatgcaaatacggaagtgaaagttactcacagcacattgaataaacggtatgatgaagaaattgcaaacaacacaacaaggagccacgcatggaaatgctcgaagagcaccgctgttttgaaggctggcagcaacgctggcgacacgactccagtaccttaaactgcccgatgacgttcagtatctttctccctccacctcgtgatcacactccgccaccagtgctgtactggctttccggattaacctgcaatgacgagaacttcaccaccaaggcgggtgcccagcgggtagcggcggaactggggattgtactggtgatgccagacaccagcccgcgcggcgaaaaggttgccaacgacgatggctacgatttaggccagggcgcaggcttttatcttaatgccacgcaaccgccgtgggcgacgcattaccggatgtatgattatctgcgcgatgaattaccggcgctggttcagagccaatttaatgtcagcgaccgctgcgccattagcggtcacagtatgggtggtcacggtgcgctgattatggcgctgaaaaatccgggtaaatacaccagcgttagcgcctttgcgccaattgtgaatccgtgcagcgtcccgtggggaatcaaagcgtttagcagctatttaggtgaggacaaaaatgcatggctggaatgggacagttgcgcactgatgtatgccagtaacgcgcaggatgcgatcccgacgcttatcgatcagggcgataatgatcagtttcttgccgaccagttgcaacctgcggtactggcagaagccgcgcgccagaaagcgtggccgatgacgctgcgtattcagccgggatatgatcacagttactacttcatcgcctcttttatagaggatcacctgcgcttccatgcgcagtatttactgaagtgaaagtccgcccggttcgccgggcatcttctcatcagaagcgataatccactgccataaagtaacgacgtccgtcttcgttatagctgtagtcgtcacgactgagatccttgtcgccaaggttcagcacgcctgcgcgcagtttgacgtctttagtcacctgccaggccgcgccggtattccagatggtataaccgcccggtgttttagccgtcgcgctgtcggcgcgtttctgcccggtatagtgcccagaaacatagaaactccagtcttccagcgccagcggtttccagtccagcgtaccgttagcagtatggaacggcagatcggatagcggtttgttttcgccgttgctgacatcacgaccatcgttgtaggtgtagttgatgctcagtttccattcatcgttgaacggaattttcagttcggtttccacgccctgaatacgagctttgttaacgttgtagtagctaaataccggtatgcgccgtccgttagcgcccgtctcaaaaccaacaaagttttggtagcccggtgcagcgttgacgtcagacgtacggctgatgctgatacgatctttcacatcgttacggaaaacggtaacgctggattcaaccccttccagccagccttcttcacccatgtagtaaagccccagctcccaactttcgctggtttctggtttcagatccgggctacccacaatcttacatgcgccacggcaggaattgctcgtccagtcagggctaagttgcaacagagaaggtgctttaaatgccgtcgcccagccccctttcaccgttacggtgtcggtggcgttataaaccaggtaggcacgcggactccagtgttcaccgtaggtttcgtgatcgtccatacgcacgccggtcgtcagcgccagcggctcgaagatccgccattcatcttccacaaacagcgcgtactggctggcagacgttttggagctggttcccccggtcaggttcaccgcatcgctaagtttgtcgtgacgccattcaccgccaaccgtgagaaactgattaatcgccgtcagcggcaacgtgtatttgccgtcgaccgtattgctttcggaagttatcgggctgctgttgccagggtttttgttctcgactttctcaccgtagtatttcagttcgctggtgccgtaatcccaacgcccattatggctgacggagtagttctggcgttccaggcggtttttgtccaggctgtcggaatcacgatcctgacggtcgaaaccgtatccggcagtaaaatcgtgattttgattcggtgtccaggcaaattcgacattgccgtcgcggctggagaatccttcaatacgcggcgtttctccggtatcggtggtcgtactgttttgcgggtcatccttttcacgttttgccaggctgccgtaagctttcattcccagcacaccatcaattaatggtccactggtaaagaactgaccgttataggtgtcaccgcgatcgcgatgttcctgaatggtggtatcgacggtaacggtaccgctccatttctgaccgatttttttggtgatgatattcactacaccgccgagcgcatcggaaccgtacaggctgctcatcgggccacggaccacttcaatacgttcgatggaatcgaccgggatccagttcagatcgaaatcattgtggcggaagacggcattgcgggagttcacgcgtttaccgtcgacgagaatcagggtatagctgctgtccagaccacgaatactaacgcccttacggttatccccttcgttcgtcagttgtacgccaggcacttctttgaggacatccttcagattctgtaccggttttcgctgcaggtcttcctgggtaatgacgctgatactggcaggtgcatctttaagattttgttccacggaagatgcagtgacaaccatcgtttcgccatcatcatcgaccgctaacacaggccatgcacaagaaatagcggacaaacacagcccgacccgtacgaaagggttcaacctaaacattccatatctccatgaggtaactacgaaaataaaatgggttatcgctcacatcttcttcacgtccccttgcgtacggcagcatcgcggtggacttattttttatgcaggtgatcatcccagaaagccggaacagcctctgatttgtcagccttttttgattgcggcgtaacgataatgcaaacgataacaattatcaatccaaatgttaaattttatatccgcatgatttgtcagggaaatggaattgaaaaagccctctcggttgagagggcttagcaaggaagggaggaaacttatttcttatcgttctgcgggaacttcatttcgctgtagcgtacgaagtgagttcctttaatcagcttgtagccgaaccaaataatcaggaacagcgggataccaatatacgttgccgctacgccgccccagtcaatagtatctttcaggaacgcttcgtagttctggcccaaagtgataatcagacacagaatgaatgcgaagatcggccccagtgggaagaaaccactacggtacggcagatcgttaatgtcgtgtccctgcaatacgtaaccgcgacggaagcgatagtggctaatggcaatccccagccaggcgataaaacccgtcatcccggaggtgttcagcagccacaggtataccgtctggttgccaaacatggaggtcaggaagcacagaccggcaatcaccgtcgtcgcatacagcgcattacgcggcacgccaccacggctcagtttagcgaaaatgcgcggcgctttaccgtcacacgccagggtgtacagcatacgagtagacgcatacataccggagttacccgcactcagcaccgccgtcagaataactgcgttcatcaccgccgccgcagagagcagacccgcgtgctggaacaccagggtgaacggactaacgctgatgtctttaacatcgttacgcagcaggctcggatcggtgtacggaataatcaggctgataatcaggatcgcgaacacatagaacaacaggattcgccagaacacctgacgtaccgcgcgtggaatgtttttcgccggatcttcggactcgcctgcagcaataccgatcagctcggttccctggaaagagaagccgacaatcatagctacgccgatcatcgccgcaaaaccaccagcaaacggcgcttcgccgattgtccagttgctccagcccgcaggctgcgcgcctttgaagataccgataatcatcagcacgccaacgatgataaagacaataactgtcgtgactttgatcagactgaaccagtattccgcttcaccaaagccacgaacactgatgtagttcagcaggaagataacgccgaggaacaacgcactccagatccagcccggtgtatccgggaaccaccagctcatgaccagctgagctgcaaccaggtcaacggcgatagtcaccgcccagttgtaccagtagttccagcccagcgcgaagccaaagccttcttcaacatagttctgaccgtaagtggcaaagctaccggaaaccggcatatatgcagccagttcaccgagactggtcatcaggaagtaaaccatcaggccaatcagcatatagctgagcaatgccccgcccggacctgcctgagaaatcgttgcgccagaggcaacaaaaagacctgtaccgatggaaccgccaatggcaatcatcgtcaggtgacgcgcctttaattcacggcgtaagcccggcgcttctgtggttttagtttcggaaaccatacaaaaatgctatccatcttaaaaatgaggcgcgattgtagcagacgattggcaatccttccggcagaaatacacggttataagacaccttcatgatcgcccagggattataagtaaagcagccaatctcttttctggcgaatgcatgctgaaggcgctgcgtcacgaaatcgacacagcaccagcatgttcttgtacagcaacttaacgcggcacatttgcgggatcgcaatagtccagaaagcgccgtagcgcgttggaaaggtgtttttgccgatgatgtatacgccacaacgtacgcatcaggcgcggcagagggaccgcaacttcacttaatgtgcctgcctgcaattgatcttcaatcacacgtcggctcaggcaactaattcccaacccatgacgcaccgcatgtttgattgcctcggagttacctaattccatcgccatctcaaacttcggtaaatgactcagcaacagataatcgacaatctcccgcgtgccggaaccgcgttcacgcaggatccacggcgcagcggccagctgttctaaggtgaccggaccacgggccaacgggctagtcggcgcggcgaaaaccaccagctcgtcttccagccacggttcagaaatgatttcagtgctgtggcacggtccttcaataaagccaatatcaacgcggaaatccagcaccgcttgcatcacgtcctggctattcccaacgctaagttcaatcggcaactgcggataatcatggcgataacgggcgataactgcaggcagaatgtagttaccgatggtactactggcatagatacgaatcgcgccgttgtcttcgcgaaacagttgttcgatttcaaccgcctgttcaagcaatgccaacgcacgcggatagagcagccgcccgtgttcattaacaaccagtcttttccccacgcgatcaaacagttgcacgccaagctgcccttccaggtcggtcaaggctgcgctcactgcactttggctcaacgccagcatcacgctcgcctgggtggtacttccacttttcaatacttctgcaaaaacttccaactgccggagggtgatgtgcatagtcgcttaccacttataaagattaattataaatatataatcaattttatttttaaaccagttagtcgtaaccttatgcccggttaaaggagagggttatgacgaatatcaccttacagaaacaacatcgtacactgtggcattttattccggggttagccctgagtgcagttatcaccggggtcgccctgtggggtggttccattcccgcggttgcgggtgccgggtttagtgccctcaccctcgcaatcttgttggggatggttttaggcaacaccatctatccgcacatctggaaaagctgtgacggtggtgtgctgtttgccaagcaatatttattacgtctgggtatcattctttatggcttccgtctgacgttcagccaaattgccgatgtcggtatcagtgggatcatcattgacgtgttgacgctgtccagtaccttcctgctggcttgcttcctggggcagaaagtgtttggtctggataagcacaccagctggttgatcggtgccggtagcagtatctgtggtgctgccgcggtactggcgactgagccggtagtgaaagcggaagccagtaaagtaaccgtggctgttgcaaccgttgttatcttcgggaccgtcgcgattttcctctacccggcgatatatccgctgatgtctcaatggtttagtccggaaactttcggtatctacattggttctactgtgcacgaagtggcgcaggtggtggcggcaggtcatgccatcagcccggatgcggaaaacgcagcagttatttccaaaatgctgcgcgtgatgatgctggctccgttcctcatcctgctggcggcgcgtgttaaacagctgtctggggcgaacagcggcgagaaaagcaaaatcactattccgtggtttgccatcttgttcatcgtagttgccatctttaacagcttccacctgttaccgcagagcgtggtgaacatgctggtaacgctggataccttcctgctggcaatggcgatggcggcgctgggtctgaccactcacgtcagcgcgctgaaaaaagctggggcgaaacctctgctgatggcactggtactgtttgcctggctgattgttggtggtggtgcgattaactatgtgattcaaagcgtcatcgcataaaccactacatcttgctcctgttaacccgctatcattaccgttttcctccagcgggtttaacaggagtcctcgcatgaaatacattggagcgcacgttagtgctgctggcggtctggcaaatgccgcaattcgcgccgccgaaatcgacgcaaccgcgtttgccttgttcaccaaaaaccaacgtcagtggcgtgccgcaccgctcacgacgcaaaccatcgatgaattcaaagccgcctgtgaaaaatatcactacacaagcgcgcaaattcttccccacgacagttatctgattaacctcggacatccggtcactgaagctctggaaaaaagccgcgatgcctttatagatgaaatgcagcgttgcgaacagctggggctttctttgctcaacttccaccctggcagccatctgatgcagattagtgaagaggattgccttgcgcgtattgccgaatccatcaacattgcgctggataaaactcaaggtgtgacagcggtgatagaaaacaccgccggtcagggcagtaacttagggtttaaattcgaacatctcgcggcgattatcgacggcgtggaagataaatcccgcgtcggcgtctgcattgatacctgccatgctttcgctgccgggtatgatttgcgtactccagccgaatgcgagaaaacattcgcggattttgcccgtactgtcggctttaagtatctgcgcgggatgcaccttaacgatgcgaaaagcacctttggcagccgcgttgaccgccatcatagcctcggtgaaggcaatatcggtcatgatgcgttccgctggatcatgcaggacgaccgtttcgacggcattccgctgatcctcgaaaccatcaacccggatatctgggcagaagagatcgcctggctgaaagcgcaacaaactgaaaaagcggtagcctgaagatgaataaccgggaaaaggagatccttgcaattttacggcgtaacccgctgattcagcagaacgaaattgcggacatgctgcaaatcagccgtagccgcgttgcggcgcatattatggatttaatgcgcaaaggccggattaaaggcaaaggttacattctcaccgagcaggaatactgcgtagtggtggggacaatcaatatggatattcgcgggatggcggatatccgttacccgcaaagcgcttctcatcccggtacaattcattgcagtgcgggcggcgtgggacgcaacatcgcccacaatctggcgctgttaggccgtgacgtccatttgcttagtgtgattggcgatgacttttatggcgaaatgctcctggaagaaacgcgccgtgccggcgtgaatgtctccggctgcgttcgtttgcatggtcaaagcacaagcacgtatctggcaattgccaatcgagacgatcaaaccgtgctggcgattaacgatacccatctgctggaacagttgacaccgcaactactgaacgggagccgcgatttacttcgtcatgcgggcgtggtactggctgattgcaacctgacagccgaggcgctggaatgggtctttaccctcgctgatgaaatcccggtgtttgtcgataccgttagtgaattcaaagcgggcaaaatcaaacactggctggcgcatattcacaccctgaaacccactttaccggagctggaaattttatggggacaggcgatcaccagcgatgctgaccgtaataccgcagtgaatgcattgcatcagcaaggtgttcagcaactgtttgtttatttgcccgatgagagtgtttattgcagcgaaaaggatggagaacaatttttgctgaccgcgccagcgcatacgacagtagacagttttggtgctgacgatggttttatggcgggcctggtatatagctttcttgaaggatacagtttccgcgacagcgcccgttttgcggtagcctgcgcggcaattagccgcgccagcggcagcttaaacaaccctaccctgtctgccgataacgcgcttagtttagtgccaatggtgtaacaatgttgccggatgcgacgcttaacgcgtcttatccggcctacaaatcaggcaatttcagcaagtaaatgtaggcctgataagcttgcgcatcaggcaatgacactcaagctaaaccaataaagaacccggcaatggtcgcactcatcaagttggaaagcgtcgccgccgccagcgcccgtaaaccaagctgggcgatttccggcgcacggtgtggcgcaaccgcagaaaacgcccccaccaccaccccgatagaaccaaagttagcgaaaccgcacaacgcgaaggaaataatcgccacagttttagcatcgagagtgccagccgtttgcagatagggactgaaattgagataagcgacaaattcatttattgccagtttctgtccaatcaaactcccggcaagattcgcatcactccagtccacacccatcacccacgccagtggagccagcaggtaacctaaaatggactccaggctggcatgttcaaaaccaaaccagccaccaacgccgccgataataccgttaatcaacgcaattattgcaacaaatgccatcaccactgttgccacacctgcggcgattttcagcccggtcattgcccctgtcgcagcggcttcaataatgctttttggcggtgtttcggtgaaagagaggttattaaaggaaacctggctagattccgttgccgggcttaacaggcgggcaaacaagatcccgccagggatcgccattaaacttgccgccagcagatattccacaggcacgcccagtgcggcgtaaccaatcattgtgctaccagcaatgctggccatgccactacaaatcgctgtaaataattcattgcgattcagacgatcgataaagggtttgacgattgccggaatttcgttttgcccgaggaaaatggtggtgaccgcgacgaaactctcgatcttgctgatatttaatgctttctggaagataccgccgagaattcgaattaaaatccccatcacaccgatgtagtagagaatactcaccagcgcggtgacgaagataattgccggtaacaccctgaaaccaaagataaatcctgcaccatcaaataaggtatccattttcggtccgaccagagaaccgaagataaatgcgctacccgcgtcgctgtacgccatcactttatgcacgccaaaagcgactttttcagcgacccaacgccctggcggtaaccaaagcataatgccgccaatcacgacctgtaacactaacgccgcgccaacggtacgcaggctgatcttcttcttgtttacactcagtaaaaacgcaatcgtcagcaataccaccattcccagaacacttctcatgacatccatagtgattatctcttcatgtcatattgggcgacggctttctgcccatcagaaatagccaggcctgcatcttgcgataccggcccggcttgttatcaacacttaatgggttttgatgtagccgcgcacgcactcttcgactaatccccagaaccagtctgtatcaatagtgatgccgactttggtattggcgggcttgccaagaacgcccagctcgtcgcagacggtacgcccatagcaagggccactgttgacgtccacttcgacgtacatctcctgggttttaatgccatcagggttaatcagataaccgatgcaggtggcgtcgtgcaccgggccgccagcaaggccgtagttttcgaactgcgttttgagagtgaagttcatgatgtcgctgaacagctctccggcggggccgcctgccctttccatccgagcaatcacgtccggggtgcaaacggtctggttggtgagatcgaggcccatcatcactaatggaacgccggaggtgaacactacgcgtgcggcttccgggtcggcaaagatgttgaactcggcagatggcgtgaagttgcctgtaccgtaagcgccgcccattagcacaatttcacggattttgggcaggatcgcgggttgcatacgcattgccaccgcgatattactaagcggaccaaccggcaccagagtgatatcgccatcgcttgccatcagggtatcaatgatatatttcaccgcatgagtgctttctgcctggcgggtcagcggctcgaataccgggccatccagtccggtttcaccgtgaatattatcggcaacgatttgttgacgcataatgggctgcggcatccccgcataaaccggaacattaatctccagtttctggcaaacattcaggccattaattaatgttttatcaagcgtctgattacccgctacaatagtgatgcctaataaatctattgccggatgtttcgccgccatcattatagcaatagcatcatcatgacccggatcacaatccagaataatttttctcttttccattgtttatttcctctgtttccagttgcgttattttttctacagcaaagaaaattcgaccgggccgatgattgaatcttaacaacagcgtacgtatgctaaatatgagaaatctcatagcggataaacatcgtgaaagaaatccacaataatgatcttaagcagcaattgatgagtgaatccgcgtttaaggattgctttttaacggatgttagtgccgatacgcggctgtttcattttttagcgcgtgactacattgtgcaggaagggcaacagccgtcctggctgttttacctgacgcgaggccgcgccaggctttacgccacgctagctaatggtcgcgtgagcctgatcgatttctttgccgccccctgttttattggcgagattgagttaatcgataaagaccatgaaccgcgtgcggtgcaggctattgaagagtgttggtgccttgcgctccctatgaaacattaccgtccgctgttattaaacgacacgctatttttacgaaaactctgcgtcaccttaagtcataaaaattatcgtaatattgtttctttaactcagaatcaaagttttccgttagtgaatcgcctggcagcatttatattactcagccaggaaggtgatctttatcacgaaaagcatacgcaagcggcagagtatttaggcgtttcttatcgacatcttttatatgttctcgcgcagttcattcacgacggtttattaattaaaagcaagaaagggtatctcattaaaaacagaaagcagttgagtggactggcgctggagatggacccggagaataaattctccgggatgatgcagtaaaaattattttcaatagcgcgattgccggatgcaacgcttaatacgttttatccggtctacaaatcgagcattacgccagaccaataaagaacccggcaatagtcgcactcatcaggttggaaagcgttgctgctgccagcgcccgtaaaccaagctgggcgatttccggcgcgcgttttgggctaatagcgctaaatgcgccaacgacaacaccgatagaaccaaagttagcaaaaccacaaagcgcaaaggagataatcgcaatggttttcacttccagcgtgccgcccgtttgcaggtatggggagaaactcaggtaagcgacgaattcgttaatcgccagtttctgcccaatcaggctacccgcaagattggcatcactccagtccacacccatgatccacgccagcggtgccagcacatagccaaaaatactttccagagaggcattggcgaaaccaaaccagccgccaattccgccgataatgccgttgatcagcgcaataattgcgacaaacgccattaccaccgtcgccacaccagcggcgatttttagcccggtcatcgcaccgctcgccgccgcttcgataaagctttttggcggcgtttcgctgaagctcagattttcaaatgtgacctggctaggctcggttgccgggctaagaatacgtgcaaacaaaatcccgccagggatcgccatcaggcttgccgctaacaggtagtcaattggtacgcccattccggcataaccaatcatcatgctaccagcaatggacgccatcccgctacaaattgcggtaaacaactcgttgcgattcatgcgatcgataaacggtttaacgatcgccgggatctcattttgcccgaggaaaatagtagtaaccgcaacaaaagattcgattttgctgatgttgagggctttctggaaaatgctgccaaggatgcgaatcagcagccccatcacgccaatgtagtacagcagactgatgagcgcagtaacgaaaataatcgccggaagtacgcgaaaggcgaagataaaacccgcaccgtcaaacaggacatccattttcggcccaaccaggctaccaaaaatgaaggcgctaccggcatcactgtaagacatcactttatgaacgcctaatgccgcctgttctactgcccattttcccggtgggaagtagagcatgatgccaccaatagcgatttgcagcagcagtgcggctccaaccgtgcgcaaactgatgctctttttattcacactcaacagaaatgctattgccagtaacaccaccatccccacaacacttctcattatatccataatgattttcccttcatgccggtaaacccggcgtcagcgccaggttttggtatgcttgatgagtacgggcgacggctttctgcccgtcagaaattaacccgcgagacgctgatattctttggcaatttcgctcgccagaatggcgttgttgaacaccagctggatgttggatttcaggctgtcaccgccggtcagttcagcaacgcgcgccagcaggaatggcgtactttctttaccaatgactccctgagcttcagcttcagctaccgcctgatcgatcgccgcattgatagtgtgttccggcatagcaaactgttccgggatcgggttcgctaccacgaggccaccgttcagaccgctttgccatttcaccaccattgcacgggcaatttcgctggcgctgtcgagacgaatgctgacgtcaaacgggctggtgcggcagaaaaacgcaggcagcgctttagtctgatagccaattaacggcacaccgaaggtttctaaatactcagtggttaatcctaaatcgagaatagatttcgccccggcacaaacaacggtgacattagtatttgccagttcttgcaaatcggcagaaatatcgaaggtatgttccgccccgcgatgcacaccaccaattcccccggtggcaaatactttaattccggcaagcgccgcaataatcatcgtactagccacagtggttgcgccattttttccggcggcaacaacaaaaggtaaatcgcgacgactaactttggtcacgttatgcccttcacgacccagtaattcaatttcttctttgcttaaccccactttcatcacgccgccaataatggcgatcgtggcaggtacagcgccctgtttacgaatagtttcttcaacttcaattgcggtctgggcattttgtgggaacggcatcccgtgagaaataatggtgctttccagcgccacaaccggttttttgttttttaaagcgtcctgcacttccggggaaatttgtaataattcaggggaaatttttaattcagacattctgcgttctccactaagcttataacgttggcaatgcttaaatcggggttattggtgtattcacaggagagcgccatactgctacatccctgtgcgaaacgaacagattcggcaaacggcattccgtctacccaacagctagcaagtcccgccatcatggcatcgcccgctccggtaacattaataacattggttttgatcggcgcagaccagccactttcaccgctgatatcgctgtaataaacgccgtcgccgcccatgctcaataccagtcggttcaggccatgttgatggaaccaggcagcaacttttgccacatcttcacgcccactcagcgcaatcccactcagggtttccgcttcaaggcggtttggcttgagagtgtggatctgatttagacggtcgcgcactttgacacatttccatgcgctaaccggatcgacaaatacgggtacgttggcggcattatccagaatccatgccagtgcctcttcactgatattacagtccgcgacaatgacctttgccctctgaataaattcaccgtgctgtgcgagatattcagctgtaatagcgttgctaatattcatgtcatttatagcaaccagcatttcaccggtattatcgagtaaacttaaataactgctcgtattttctcccggcacaatcaggcatttatcgacataaacgccagattgattggtttgcgttagcaggctttgaccataaaaatcactgcctacggcgctcagtagccaggctttgttacccagcaacgccaggttttgtgcaatattgcgccctactccaccaggcgtaaattttattttacctggattactatccgcataatttaaactttcatgactatatccggcgacatcaatattcgcgctacctataattacgacataatccttttcgcgcatagcacgtcctctggtaaaaaattaccaaccctgtcaatccacaagaatatagatactgcaaagacggtttaaacatgtgttcatatttaaacatgtgctcatagtatgcatgttttacgtaaagtaaattaccgccagagaggcaaaatgggcagatttgagcaggctcacaaaatgcgattaaatgcctgaattacaaaagcgaggaatttgtgacgggatgcacagaacagaacaataaaaaagggcagaaaataatctgcccttgaggaaataacctgagtgtttgatgaacgtttgaagtttctactgaaagataaaaccatttaaattcataaaattacattcacaaaccggtcattctctttgcgctcatcaaatgttacaggacaggaaatttctgccctgtaacacaccttttattacgctgctttcgctactgcgtccacttccggacgtttcaggaaggcataggccaaacccgccaccagcgtaccggcaataattgctaccaggtaacccaataccggcgtaatagcgccagggatcagcagaacaaacagaccaccgtgcggtgccatcagtttcgcaccaatcgccatactgattgcgccagtcagcgccccacccacgatacagcacggcagcacacgcatcggatcacgagcagcaaacggaattgcaccttcgctaatgaagcacagtcccaataccagagcggctttgccaccttcctgctgcgctttgtcgaatttgcgacgcgccaccattgttgccagacccattgccagcggtggcaccatacctgccgccataatcgccgccatcgggccataggtttgagtactcagcagacccacaccgaatgcgtacgctgctttgtttaccggaccgcccatgtcagtacacatcatgccaccgaggatcgcccccagcagaaccgcattcgcagtccccatggtctgcagccagtgagtcagcccttcgagaatgccagcaactggtttaccgatcaggtagatcatcgccagaccgaccaccagactggaaattagcggaatgatcaggatcggtttcagcgcctccatactctgtggcagtttcaattgcgtactgattaacttcgcaatgtaaccagccaggaagcccgcaataataccaccaatgaagccagaaccggtgctgaccgccagcataccgccaatcagacccggagtgaggcccggacgatcggcaatggaaaaggcaatataacctgccagtaccggcaccatcagcgcaaaggcactaccaccaccaatctgcatcagcgccgcagccaacgtacccggctctttaaacgcttcgataccaaaagcaaaagaaagcgcgatacacagaccacctgcaacgaccatcggcagcatgtaagaaacgcccgtcagcaagtgacggtatgcgcctgcactctctttcttactttcagtggtcgccgtttgagctttgcccgccggttcatacggcgttgcttcagcaaccgctttatccagttcctgcgcggttttcttcagcgccagaccggtagaggtacgatacatcggtttaccagcaaatttcgccagatccacttcgatatctgccgccacaatcaccagatccgctgctgcgacttcttcgggagtgattgcattacccgcgccaacagaaccacgggtttcaactttcacccaccagccacgttttttcgcttcggtttcaatggcttcagccgccataaaggtgtgtgctacgccagtcgggcaagcagtcaccgcaactacgcgtttcggaccgctggcggcaactggtgctgtcgcagcgaccggcgcagtgtaaggtttcgcatggcctttggcttcactcaggaacagctcagggtgcgcaactgcccgggaaatatcgcccagccagacatttttaccgttcagcgcgctgtcgttcgggatggaatcaccgagaacaatcgccatttcagcgtcgttcggattgtcgatgatttccagttttgcttttcgcgccgccgcgcccagcagggtcttcgccatataggcgcgtgcctgaccgagattagcgtcaataatcagcagcgttttcattatgcctctcctgctgtcagttaaaaggttgtaagtcgacgcgcgccatcattgcggccaactgcggacgatcggtaatacccacattgctttgacttaccgccagggctgcaacagctgtcgccagacgcagtgtgtgttcactggattcacgcatcagcaagccataaatcaggccaccaaccatagaatcccctgcgccaacggtgcttacgacatcgacactcggtggtttggcgatccattcgccggaggcattaacccaaagcgcgccttcggcacccagactaataacaacatgcgcgatgccttgttcacgtagcgcatgtgcagcttcaatcacatctttcatttcaggcagtttacggcctgcccagatttccagctcgcggcggttaggtttcaccagccacggtgccgctttcaaacctgctactaacgcttcacggctactatcaaagataatgcaaggacactgactacgcaggcgagtcatccagtcggtgaacgcttccgggctgacgccactcggtaagcttccgctgacacagaccatatcgaactgaccgagccagctcagagaatcagtcacaaagcgttcccagtcggcgggggtgacttcaaaaccgctgaagttgaagtcggtcacttcgccgtctttttccgtcagcttaacgttaattcgggtgcgcccctgtacaacctggaaacggttggcaatgcccagctcgctgaacagttgctgaaaaccatcctgattgtctttacccaggaagccgccaacggtgacatcaattcccaggtcttttaatactttggccacgttgatgcctttacccgccgcatgcagaccggtggttttcaccaggttcacttcgccgcgttcaatttccgggcagaaaccaacaaggtcataagccggattaagggtgatagtagcaacacgtctgctcattatgcgccctccccaagaccagcagcgatagcgtcgccgattgctttcagcgcctgttcagcatctgcaccctgggcggtaaagcgtaggcgatgacctttcttaacgccaagtgccacaactttcatcagactacgtccgtttgccggtttgccggtaccatcaaggtttgtcacggtaatatcactgttaaattgtttaatggtattgaccagcatggtacctggacgagcatgcaggccgtgttcattgcgcaccacaaactccgcgcttaacacgtcgtcggtcggcgcatcatcgctggtcagcagcgccagcaacgttgccgcatccgctttcagcaagcggtcagctttattgtcgagcaataaatcagcgagacgcttaagaaccgcgatgggctgatcgtcattcatcgccacactcaccagcatggctgccgtttcgccgtccacatcaaaagcatttgccgcacggcttaccgcaatcgcgctacgcagattgccttcggcgctatcgctcagccagataccctgtccgagattcagcggttgttcattgatggctttggtgacgaaagtggcgtcaactgcccccgcctctttcagacgcgcagcgttcagcgcctgaagagtcagcagatcgctggcgacgatatccagtgtcagcatttcgttgtcgagcttcagctgctcactctgcttttcgcccatcagtaatgcgcgaagttcttctgctgttgttgcactcttcagttgttcagcaacggaatcatcgctcagtacgtgggtcagctggcgtagcaggcccagatgttcatcgctgctggcagcaataccgattgccacgtacgctacctgaccgtcaccccaggtgacgccttccgggaactgaaatacctgaacgccggttttcagcacctgatcgcgggtgtcggtagtgccgtgtggaatagcaataccattgccgaggaacgtactggtttgctgttcgcgcgccagcatgccattgacgtagccttctgctacattaccggcctgcaccagcgccgcagcgacctggcgaatcgcctcttctttgtctccggccttttcgcccggatggatgtcctgtacggataactggaacatagttctcctctcttgctgaattgaaacgattcagcctctatgagaaaaaaagcgccaacctggcttagggttaaagacaagatcgcgctgaaacgtttcaagaaagcataatacttctgtttcagcacgcaaggaaagccgtaaagttatgagcaaaagtttgatgtgctgcacaattttttgccatttttcctaattgctgatgggaaaatccgttatcagcaatttcatttcagcagcgtcagcagccaatcagcaacagtgaaatggcattttgactattcgtggcgcttttgatttcgctgtctgtttattttctgacaagcagcgtaaactccgcgtcttcctcttccagtgatcgaccagcatgcataactcccccgcagtctccagcgcgaaaagctttgacctgaccagcacggcgtttttaatcgttgcctttctcaccggtattgcgggcgctctgcaaaccccgacactcagtatttttcttaccgatgaagtacatgcccgtccggcgatggtgggattcttctttaccggcagcgctgtcattgggattctggtaagtcagtttctcgccgggcgctctgataagcgcggcgatcgcaaaagcctgattgtcttttgctgcctgttaggcgtgctggcctgcaccctttttgcctggaatcgcaactactttgttttgctattcgttggcgtctttcttagcagctttggcagcaccgctaacccgcaaatgtttgcccttgcccgtgaacatgccgacaaaaccggacgtgaggcggtgatgttcagctcttttttacgcgctcaggttagtctggcatgggtcattggcccaccgctggcttatgccttagcgatgggtttcagctttacggtaatgtatctgagcgcagcggtagcgtttattgtttgcggtgtgatggtgtggctgtttttaccgagcatgcgaaaagagcttccgctggcgaccggcacgatcgaagcgccgcgccgtaaccgtcgcgatacgctgctgctgtttgtcatttgtacattgatgtggggcagcaacagcctgtacatcatcaacatgccgctatttattatcaacgaactgcatcttcccgagaaactggccggtgtgatgatggggaccgccgccgggctggaaatcccgacgatgttgattgccggatatttcgccaaacgtctgggtaagcgtttcttaatgcgcgttgctgccgtgggtggcgtctgtttttacgcaggaatgctgatggcgcatagtcctgtcattctgttgggcttgcagctgctaaatgctatttttattggcattctgggcggcatcgggatgctctattttcaggatctgatgcccggtcaggcgggtagtgccaccacgctctataccaacactagccgcgtgggctggatcatcgcaggaagtgtggcgggcatcgtcgccgagatctggaattatcacgctgtgttctggtttgcgatggtgatgattatcgccactctgttttgcttactgcggattaaagatgtttaaggcgcggtcagcatttccagatcgataagccaggtcatggcctgctgacggctgttaccgcacatttcagcgctggcttgtaagcctgcacagactttcggtcgcagtgggctggtgaaaattttacagcgttgctgttcatcaagctgaatgcagggcgtattggcgggcttgccatctggcataccgggaatagggctggaaatactaggggcagtgcaacacgccccgcaacccggacggcattccatacgttgttctcttaaggttaaccaccggattgatgagcgcgcacagtaccaccttttttgcaccagcaaaagtgcgaataccacttgcccgaaaggcccgtcgcgagtactttgtcgcgatatttttgacattttcgactacaggaatttttcgatgccaagagcgaacgaaattaaaaaaggtatggtactgaattacaacggcaaactgctgctggttaaggatattgatattcagagccccactgcccgcggtgccgctacgctgtacaaaatgcgtttttctgatgtccgtaccgggctgaaagtagaagagcgtttcaaaggtgatgatatcgttgacaccgtgacgctgacccgccgttacgttgacttctcctatgtcgatggcaacgaatatgtctttatggataaagaagactataccccgtataccttcaccaaagatcagattgaagaagagttgctgtttatgccagagggcggcatgccggacatgcaggtgctgacctgggacggtcaactgctggcgcttgagctgccgcagaccgttgatctggaaatcgttgaaaccgcaccaggcatcaaaggggcatctgccagcgcccgtaacaaaccggcgacattgagcactggtctggtgattcaggtaccagaatacttaagcccgggcgaaaaaattcgtatccatatcgaagaacgccgttatatggggcgtgctgactaacttcagccgcatgcagaaaagggatagctcaggctgtcccttttttaatttattataccaatcttctattttgcgcttcctgaacaccttacgccctcaattttcactcgttgattgatcgccctcacacttcatcgcattaacaatccagaccaatttcaattgctgtcatataactttacactgtcgttgttaattaatcgttactaagacgtgactcctatgaatacaatcgcctccgttacgctcccgcatcatgtacacgctccacgctatgatcgccagcagttgcaaagtcgtatcgttcattttggctttggagcctttcaccgcgctcatcaggcgttactgaccgatcgtgtgctgaatgcccagggcggcgactgggggatctgtgaaatcagcttgttcagcggtgatcaactgatgagccagctccgcgcacagaaccatttatataccgtgctggagaaaggtgcggacggcaatcaggtgataattgtcggtgccgttcacgaatgccttaatgcaaaactggattccttagcggcaattattgagaaattttgcgagccacaggtggcaattgtttccctgacgattaccgaaaaaggctattgtattgacccggccaccggtgcactcgacaccagtaatccgcggattattcacgatctacaaacccctgaagaacctcactccgcaccgggtattctcgtcgaagcactgaaacgccgccgtgagcgcggccttacaccgtttaccgtgctctcctgcgacaatattcccgacaatggtcatgtggtgaaaaacgcggtgctgggaatggcagaaaaacgtagcccagaactcgccgggtggataaaagagcacgtcagttttccgggaaccatggtcgaccgcattgttccggctgcaaccgacgaaagtctggtggaaatcagccagcatctgggggtgaatgatccctgcgcgattagctgcgaaccgtttatccagtgggtggtggaagataacttcgtcgctgggcgtcctgcctgggaagtcgcaggtgtacaaatggtgaatgatgtcctgccatgggaagagatgaaactgcggatgcttaatggcagccactcttttctcgcttatctgggttacctcagtggattcgcccatatcagtgattgcatgcaggatcgcgcatttcgccatgccgccagaacattaatgctggatgagcaagcgccgacactgcaaattaaagatgtcgatttaacacaatatgcggataagttaattgcacgttttgctaatccggcgctgaaacataagacctggcaaatcgcgatggatggcagccagaaattaccgcaacgcatgctggcaggtattcgcatacatcaggggcgcgaaacggactggagcttgctggcattaggcgttgcaggctggatgcgttacgtcagcggcgttgatgatgccggaaatgccattgatgttcgcgatccgcttagcgataaaattcgcgaacttgttgcgggcagcagcagtgaacaacgcgtaaccgccctgctttccctgcgtgaagttttcggtgatgatctgccagataacccgcattttgtgcaggccatcgaacaagcctggcaacaaatcgtacaattcggcgcacatcaggcgctattaaacaccctcaaaatttaacgatttctgcggttaaagcggatgaagctcaccttcgtccgctctccccttctcttttctgccttttttagccaggattaacgctcagttaacttaccagagtattgcggagccgttgtgaccaggaccaacctcatcaccggttttctcggcagcgggaaaaccacgagcattcttcatctgttagcccataaagatcccaacgaaaaatgggcggtactggttaatgaatttggggaagtcggaattgatggtgctttgctcgccgatagcggcgcattgctgaaagagatccccggcggctgcatgtgctgcgttaatggtttacccatgcaggtagggttgaataccttactgcgtcagggaaaaccagaccgcttgttgatagagccgaccgggctgggccatccgaaacagatcctcgatctgttaaccgcaccagtctatgaaccgtggatagatctgcgcgccaccttgtgcattctcgatccgcgcttgctgctggacgaaaaaagcgccagcaatgaaaacttccgtgaccagctggctgccgcagacatcattgtcgccaataaatccgaccgtacgacgcccgaaagtgagcaagcgctacagcgttggtggcagcaaaatggtggcgatcgacaattaattcacagtgagcatgggaaagttgacggtcatcttctggatttgccgcgtcgcaatttagccgagttgcccgccagcgccgcgcattctcatcagcatgtcgtgaaaaaagggttagcagcgttaagcctgccagagcatcaacgctggcgtcgcagtctgaacagcgggcaaggatatcaggcctgcggctggatattcgacgctgatacggtattcgacaccattggcattctggaatgggcgcgacttgcaccggtggaacgcgtcaaaggcgtgctgcgtattcccgaagggctggtgcgaatcaaccgtcagggcgatgacctgcacattgaaacgcaaaacgttgcgccaccggacagccgtattgagctgatttccagcagcgaagctgactggaatgccttgcagagcgcgctgttgaagcttcgtttagcgactaccgcgtaaggttgcctgcgtttttcagtaagataattagagaaaatatgattaaaaatttgccgcaaatagtgttgttgaatattgtcggcctcgcgctgtttctttcctggtatatccccgttaatcatggattctggttgccgattgatgcggatattttttatttctttaatcagaaactggtcgaaagtaaggcctttttgtggctggttgcattgaccaacaatcgcgccttcgacggttgtagtctgctggcgatgggtatgttgatgctgagtttctggctgaaagaaaacgcccctggcagacgacgtatcgtgattattggtctggtcatgctattaactgcagtggtattaaaccagctgggtcaggcattaattcctgtaaaacgggccagcccaacattgacttttaccgatattaaccgcgtcagcgaactgctctctgttcccacgaaagatgccagtcgagatagctttcccggcgatcacggcatgatgctgcttatttttagcgcattcatgtggcgttatttcggcaaagttgcaggccttatcgcccttattatttttgtggtttttgcatttcccagagtaatgattggcgcacactggtttactgacatcattgtcggtagcatgaccgtgatattgatcggtttgccctgggtgttgctgacgccattaagtgatcgattaatcaccttttttgacaaaagtctaccaggaaaaaacaaacatttccaaaacaaataactcacagtaattaacatcatcagggttatttttatagtgaggataatcctgatgatgcgcaccgtgctttcatctatcgaacgcaaaaatcattctctaagtaaatgaatggattgcatgcgtttcactcaattgtactttaattgaccaaccccgcttattaactttctgtatcactttttcttataaaaaatcatgtaaaaccgctcgccaagaccgcaccaatcgggtaatctcgaactcgttttgcctcggcggtagattatcctcacagcatataattttgtgcgttagtccacagatttggccttaaggaattgtttcaacatgcccaggtaattagtctcgtgtcgcttggcatttttttataacgatatttgtcgttaaggacttcaagggaaaacaaacaacatggtcaaatctcaaccgattttgagatatatcttgcgcgggattcccgcgattgcagtagcggttctgctttctgcatgtagtgcaaataacaccgcaaagaatatgcatcctgagacacgtgcagtgggtagtgaaacaagtagtctgcaagcttctcaggatgaatttgaaaacctggttcgtaatgtcgacgtaaaaagccgaattatggatcagtatgctgactggaaaggcgtacgttatcgtctgggcggcagcactaaaaaaggtatcgattgttctggtttcgtacagcgtacattccgtgagcaatttggcttagaacttccgcgtagcacttacgaacagcaggaaatgggtaaatctgtttcccgcagtaatttgcgtacgggtgatttagttctgttccgtgccggtagtacgggacgccatgtcggtatttatatcggcaacaatcagtttgtccatgcttccaccagcagtggtgttattatttccagcatgaatgaaccgtactggaagaagcgttacaacgaagcacgccgggttctcagccgcagctaataaaccgtttggatgcaatcccttggctatcctgacgagttaactgaaagcactgcttaggcagtgcttttttgttttcattcatcagagaaaatgatgtttccgcgtcttgatccaggctatagtccggtcattgttatcttttaaatgttgtcgtaatttcaggaaattaacggaatcatgttcatacgcgctcccaattttggacgtaagctcctgcttacctgcattgttgcaggcgtaatgattgcgatactggtgagttgccttcagtttttagtggcctggcataagcacgaagtcaaatacgacacactgattaccgacgtacaaaagtatctcgatacctattttgccgacctgaaatccactactgaccggctccagccgctgaccttagatacctgccagcaagctaaccccgaactgaccgcccgcgcagcgtttagcatgaatgtccgaacgtttgtgctggtgaaagataaaaaaacattctgtagttctgcgaccggtgagatggacattccactcaatgaattgattccggcgctcgacattaataaaaacgtcgatatggcgatcttacccggcacgccgatggtgccgaacaaacccgcaatcgtcatctggtatcgcaaccctttgctgaaaaatagcggcgtctttgccgctctgaatctcaacctgacgcctagtctcttttatagtagtcggcaggaagattacgatggcgtcgccctcattattggcaatactgcgctatctaccttttctagtcgtttgatgaacgttaacgaattaaccgacatgccagtccgtgaaactaaaattgcgggcattcctctgaccgttcggctttatgcagatgactggacatggaacgatgtgtggtacgcatttttactgggcggcatgagtggaactgtcgttggcctgctctgctattacctgatgagcgtacgtatgcgccccggcagagaaatcatgaccgccatcaagcgcgaacaattttacgtggcgtatcaaccggtggtggatacacaagctttgcgagtaacgggcctggaagtactgctacgctggcggcatcctgtcgcgggagaaattcccccggatgccttcattaactttgccgaaagccaaaagatgattgtgccgctgactcagcacctgtttgagttaattgcccgcgatgccgcagaattagaaaaagtgctgccggtaggcgtcaaatttggtattaacattgcgccggaccatctgcacagcgaaagctttaaagcagatatccagaaactgctcacttccctgcccgcacaccatttccagattgtgctggaaattaccgagcgcgatatgttgaaagagcaagaagccacacaactcttcgcctggctgcacagcgtcggcgtagaaattgctattgatgacttcggcaccgggcacagcgcgcttatctatcttgagcgttttacgctcgattatctgaaaattgaccgtggatttatcaacgccatcggtacggaaacgatcacttcccccgtacttgacgcggtgctgacgctggcgaaacgcctcaatatgctgacggttgctgaaggggtcgaaacgccggaacaggcgcgatggctaagcgaacgcggcgttaatttcatgcaaggctactggattagccgcccgttaccgctggacgattttgttcgctggctaaagaaaccgtatacgccgcagtggtaaggtgtgcttacgtcccttattattcatagtgaaagcatgccggattgcggctaatgatgagtaaaaggaaatccgttgcagatgattgtgcgcatactgctgctgtttatcgctctgttcacctttggtgtgcaggcgcaggctatcaaggaaagctatgcctttgccgtgctgggcgaaccccggtacgcgtttaatttcaaccattttgattatgtgaaccccgccgcgccaaaaggtgggcagataacgttgagtgccctcggcaccttcgataatttcaaccgctatgcactgcgcggcaacccgggcgcacgcaccgagcagctgtacgacacgctatttacgacttccgatgacgaaccaggcagttattacccgctgattgctgaaagcgcacgctatgctgacgattattcctgggtggaggtcgctattaatccgcgcgcccgttttcatgatggtagccccattactgcccgcgatgtagagtttacttttcaaaaatttatgaccgaaggcgtgccgcaatttcgtctggtctacaaaggcaccaccgtcaaagccattgcaccgttaaccgtgcgcattgagttagctaaacccggcaaagaagatatgctgagtctgtttagcctgccggtatttccagaaaagtactggaaggatcacaaacttagcgacccgctcgccacgcctccgcttgccagtggtccgtaccgcgttacgtcctggaaaatggggcaaaatattgtctattcccgtgtgaaagattactgggcagcaaacttaccggtaaaccgtggacgctggaatttcgacaccattcgctacgattattacctcgatgataatgtcgcctttgaagcgtttaaagcaggtgcctttgatttgcgtatggaaaacgacgccaaaaactgggccacgcgttataccggtaaaaatttcgataaaaaatacatcatcaaagatgagcaaaagaacgaaagtgcccaggatacgcgttggctggcgtttaatatccaacgtccggtattcagcgatcgccgggtccgggaagctatcactctcgcctttgactttgaatggatgaacaaggcgttgttttacaatgcctggagtcgcacgaacagttattttcagaataccgaatacgcggccagaaattaccccgacgccgcggagctggtgcttctggcaccaatgaaaaaagatctaccgagtgaagtcttcacacaaatctaccagccgccggtatccaaaggcgatggctacgatcgtgacaacctgttaaaagccgacaaacttctcaacgaagcgggctgggtgctgaagggtcagcaacgcgttaatgccacaacgggtcagccactcagctttgaattattgcttcccgcaagcagcaatagtcagtgggtattgccgttccagcacagcctgcaacggctgggtatcaacatggacattcgcaaggtggataacagccaaatcactaaccgcatgcgcagtcgcgactatgacatgatgccgcgcgtatggcgggcgatgccgtggcccagttccgatttacagatttcctggagtagcgaatatatcaattccacttataatgcccccggcgtgcaaagcccggttatcgacagcctgatcaaccaaattattgccgcgcagggaaataaagaaaaattactgccgttggggcgagcactggatcgcgtattaacgtggaattattacatgctgccaatgtggtacatggcggaagaccgtctcgcctggtgggataaattctcccagccggccgtgcgccccatctatagcctcggtatcgatacctggtggtatgacgtcaataaagcggccaaactgccgtccgccagcaaacagggagagtaaatgggcgcttacctgattcgccgtctgttgctggtgatcccaacattatgggcgattatcaccatcaactttttcatcgtgcaaattgcgcctggcggtccggtcgaccaggccatcgccgccattgagtttggtaatgccggagtattacccggcgcaggcggtgaaggtgttcgtgccagccatgcgcaaacgggtgtcggcaatatcagcgacagtaattaccgtggcggacgcggattagatccagaagtgatcgctgagatcactcatcgctacggttttgataagccgatccacgaacgttacttcaaaatgctctgggactacatccgctttgattttggcgatagcctgtttcgcagcgccagcgtgctgacgctgattaaagacagtctgccggtttccatcaccctcggattgtggagcacgctgattatctatctggtgagcattccgttaggcattcgcaaagctgtttataatgggagccgctttgacgtctggagtagcgcatttatcatcatcggctacgccattccggcctttttgtttgccatcctgctgattgtcttcttcgcgggcggcagctatttcgacctgttccctctacgcggcctggtttccgctaactttgatagcctgccgtggtatcagaaaatcaccgattatctgtggcatatcacgctgccggtgctggcgacagtgattggtggctttgcggcgctgaccatgctgacaaaaaacagtttccttgatgaagtgcgcaagcaatacgtggtgaccgcgcgtgcgaaaggggtaagtgaaaaaaatattctctggaaacatgtgttccgcaacgccatgctgctggtgattgccggttttccggcgacgtttatcagcatgttttttaccggcagcctgctgattgaggtgatgtttagtctcaatggtctgggcttactgggctacgaagcgaccgtcagccgcgattatcctgtaatgtttggtaccttgtatattttcaccctgattggcctgctgctgaatattgtcagtgatatcagctatacgctggttgatccgcgtattgattttgagggacgttaatgagccgactcagccccgtcaatcaggcccgttgggcgcgttttcgtcataaccgtcgcggctactggagcttatggattttcctcgtcttgtttggtttgagtttgtgttctgaacttatcgccaacgataaaccgttgctggtgcgttatgacggcagttggtatttcccgttattgaaaaactacagcgaaagcgattttggcggcccgctggcaagtcaggctgattatcaggacccgtggctgaaacaacggctggaaaataacggctgggtactgtgggcaccgattcgctttggtgctaccagtatcaactttgctaccaataagcccttcccttctccaccctcccggcaaaactggctgggaacggatgccaacggcggcgatgtgctggcacgcattctctatggcacgcggatcagcgttctgtttggcctgatgctgactctctgttccagcgtgatgggcgtgctggcgggggcgctacaaggctattacggcggtaaagtcgatctctggggacaacgctttattgaagtatggagcgggatgccgacgctgtttttgattattttactttccagcgtcgtacagcctaacttctggtggctgctggcaattactgtcttgtttggctggatgagtctggtcggcgtggtgcgggcggagtttttacgtactcgtaatttcgactacattcgtgcggcacaggcgcttggcgtcagcgatcgcagtatcatcctgcgtcatatgttgcctaatgccatggtcgcgaccctcacctttttaccgtttattttatgtagtagcataaccaccctgaccagcctcgatttcctcggcttcggtctaccgctcggtagtccgagtctcggtgaactgctgttacaagggaaaaataaccttcaggccccgtggcttgggatcaccgccttcttgagcgtggcgatattattgtctttgctgatctttattggtgaagccgtccgcgacgcatttgatcctaataaggcggtgtaacatgacgcaaactctgttagcgattgaaaatttgagcgtgggttttcgccatcagcaaaccgtacgtacagtagtcaatgatgttagtctacagattgaggctggcgaaacgctggcgctggtgggtgagagtggtagtggcaaaagcgttaccgcgctgagtattttacgcctgctcccttccccgccggttgaatatctctccggcgatattcgttttcatggcgaaagcctgcttcacgccagcgatcaaacgttgcgcggtgtacgcggtaataagatcgccatgatttttcaggaaccgatggtgagcttaaatccattgcataccctggaaaaacagctttatgaagtgcttagtctccaccgcgggatgcgtcgggaagcggctcgtggcgaaattcttaactgccttgatcgcgttggtatccgccaggcggcaaaacggctgacagattatccgcatcagctctccggcggcgaacggcagcgggtgatgattgcgatggcgctgttaacgcgaccggaattattaattgccgatgaaccgaccaccgcactggacgtctctgtccaggcgcagattttacagctgttgcgcgaactgcaaggcgagctgaatatgggcatgctgtttattactcataacctcagcattgtcagaaaactggcccaccgcgtggcggtaatgcaaaacggtcgctgtgtcgagcaaaattacgccgctacgctatttgcaagtcccactcatccttacacacaaaagctactcaacagtgaaccgagtggcgatccagtgccgttgccagaacctgccagtacgttgctggatgttgaacagcttcaggttgccttccccattcgcaaagggattttgaagcgcattgtggatcataatgtggtggtgaaaaacatcagttttacgctacgagcgggtgaaacactgggtttagtgggcgagtccggttccgggaaaagtacgacgggactggcgctgctgcgactgattaattctcagggcagcatcatctttgacggtcagccactgcaaaatttaaatcgccgccagctgttacctattcgtcatcgcattcaggtggtatttcaggatccaaactccagcctcaacccacgactcaacgttttgcagattattgaggaaggcttacgggttcaccagccgacgctttctgccgcacaacgcgaacaacaagtgatagccgtgatgcatgaagtgggattagatcctgaaacacgccaccgttatccggcggagttctctggtggtcagcgacaacgtattgcgattgccagggcattaattcttaagcccagcctgatcatacttgatgaaccgacaagtagtctcgacaaaacggtacaggcgcaaatattgacgctattgaaaagtttgcaacaaaagcatcaactggcctatttgtttatcagccacgatttgcacgttgtccgcgcgttatgtcatcaggttatcatactgcgacaaggggaagtagtggaacaaggaccgtgcgcgcgcgtgtttgccacaccgcagcaggagtatacgcgtcagctactggcgttgagctgacgcttaaaaaggattgtagttactaaagggttcggcaattgccacaccaaaatttttcaatcggcatgttgcagcaaactcgtcctggcgatttacaaacaggcacggctcaccttcacactccagcacgctacatggaacttcgatgtcgcttaacgcctggcttagtttatacatcacgctccatgcattatcaccatccgggctaagcaatttaagcgccaccaggctgttgtcaccgcacggtccattttgcggaatcggttcaaccttgctacctgcgaaaccagcagaccagcgatagttctgcggcagtcgatggacgatactgagttgtaaactagtcacttattttccccggaagcacattcacttcacaatttgtttacatcaattttaacacatcatcaacaatccgtctttatacagatcgtaaagattgatgcctcgcctgcgtggcctctatggctctgatttaagtaatatctgcgggcgtggtcacgtttgcggggctatatgtacccgtttctgcgatctaactcaacctttttaactacaatgatgtgactttttacataaattgattttacataaaataaacatatatcgggggaatgatagatttgtggttgacatgcatcaacaaaggaagccttttagcttcctcgttgtgcaatagatcaccgttttttcggccgactggcgtacagacagaagagaatggagctggttgcgcagaatgcaatactccaaatcatcggccatgcagagttaaaggtcgcaagagaaagcaatgcgccaacaattgcccctatgccaaaacggaaggttcctgccaggctagatgccgttcccgccatatggggaaactcatcaagaatgaccgccatcgcattggaactcaccatgctcacgcagcccacaaacgccgcaacgccaaccaccaggctccaaaatcccagccccagcagcgcactgatgaccatccacgctgccataataaattgtatccacaacccgctgcggaacatatttaacgcgccaatgcggcggacgaagcggctgttaaagatggtcatcacgaacagaaaaacaatgtttagcgcaaagtaataaccaaagttttccggcgcgacgtggttaatttcaatataaacaaacggtccggcgcttaagaaactgaacatcccggcaaagctgaaaccactggcaagcatgtagctcaggacacgtttatggcggaacagcgccgcaaagttaccaatagtggtacgaatgtgaaatggctgacgacgctccggtggtaaggtttctttaatcaggaagaaaatcattgcgctagccagaatcgccgctaatgccaggatccagaagatgtaatgccagctcagccacaccagcacccagccgccaactatcggtgccatcagcggtgcaatggttgtcaccagcatgacaaagctcatcatccggctgaactcttctttcgggtaaatatcgcgcatcagggcgttaatgaccacgctggccgcagccgcagccagcccgtggaagaaacgcatcacaatcagctgatcgatggtgtttgccaacgcacacgccaccgcggcggcggcaaacaccagcgtaccgccgagcaccaccggcttacgcccgaagctgtctgccatcggcccgtagattaactgccccaacgcaaagcccagaatataagtactgagggtcatctgcgtactgcccgccggtacgccaaactgcgcactaattaccggtagcgcgggcagatacatatcaatgctcagcggcatcaacatggccagcaggccaaggataaaaacaatagcaaagctgctatgctgtcgggtggtcacaacgggctcctgaaagtcattgaaaagttagacgacgctggcaatttcttcttcagttaacggacgatattcaccgggggctaaatcagcatccagcgtaataccgccaatacgttcacgatgcagctcaaccacgtggttacccacggcggcgaacatgcgtttcacctgatgataacgcccttcgctgatggtcagacgaacctgcgttggggtaatcacttccagcaccgcaggcttagtgagatctttttcgttatgcagctgcacgcctttagcaaattgctctgccgtatcgtcagctacaggactttccagtgtcaccagataggtcttctcgcaatgatggcgcggagaagtaatgcggtggctccactgaccatcatcagtcatcagcaccagaccggtggtatcaatatccaaccgccccgccgcatgcagtttccacgctaccggttcatcaagaaaatagagcaccgttgggtgatcagggtcgtccgtggagcaaacatagccctgaggcttattgagcatgaagtaacgtggaccgtgttgctgcgccagcgggttgccatcgtaagcgacatcatgttcaggaagcagtttgaacgctgcattacggacgatttcgccatcgacggtgacacgattgccgcggatttcacgcccggcaatagcacggctaacgccgagttgctgtgcgataaatttatcaagtcgcatgtgtgtgattttgcctgtaaaaacggaggtcgggcattgacccgaaaatctgaactgttgtctgcccagtatagcggtctaataacatccctcaagggaaaaagatccatggcatactattagcagaataatctacctacgcgagaccatgatttttacacttcgcccatatcagcaagaagccgtggatgccacgctcaaccattttcgtcgtcataaaacccctgccgttatcgtgctgcccaccggcgcaggtaaaagcctggtgatagcggaactggcacggctggctcgtggtcgcgtgctggtgctggcacacgttaaagaactggtggcgcaaaaccatgcaaagtatcaggcgctggggctggaagccgatatttttgccgccgggctaaagcgcaaagagagccacggtaaagtggtatttggcagcgtgcagtctgtcgcccgtaatcttgatgcctttcagggtgaatttagcctgttgattgtcgatgaatgtcaccgtattggtgacgatgaagagagccagtatcagcaaatcctcactcacctgacaaaagtgaatccccacttacgcctgctggggctgactgccacgccttttcgattgggcaaaggctggatctaccagtttcattatcacggcatggtacgcggcgatgagaaagcccttttccgtgactgcatttatgagctgccgctgcgttatatgattaaacacggctatctgacgccgccagaacgactggatatgccagtagtgcaatacgatttcagccgcttgcaggcacagagtaacgggctgttcagcgaagccgatctcaaccgtgagctgaaaaaacaacaacgtattaccccgcacatcatcagccagattatggagtttgctgcaacgcgcaaaggggtgatgatttttgccgcgacggttgaacacgcaaaagagattgtgggattactgcctgccgaagatgcagcactgattactggcgacacccccggcgctgagcgcgatgtgttaattgaaaattttaaagcccagcgttttcgctatctggtcaacgtcgcggtactgaccaccggatttgacgccccgcacgtcgatcttatcgccattctgcgccctaccgaaagtgtgagtctttaccaacaaattgtcgggcgcggtctgcgtctcgctccgggcaagactgattgcttaattcttgattatgcgggtaatcctcacgatctctacgcgccggaagttggtacaccaaaaggcaaaagtgacaacgttccggtacaggttttctgccctgcctgcggttttgccaacaccttttgggggaaaacgaccgccgacgggacattgattgaacactttggtcgtcgctgtcagggatggtttgaagatgacgacggtcatcgcgaacaatgtgacttccgtttccgttttaaaaattgcccgcaatgtaacgcggaaaacgatattgccgcccgccgctgccgcgaatgtgacaccgtactggttgatccggacgatatgttaaaagcggcgctacgactgaaagacgcgctggtattacgctgtagcggcatgtctttgcaacatgggcacgacgagaaaggcgaatggttgaaaatcacctattacgatgaagacggcgcggatgtgagtgagcgtttccgtctgcaaacacctgcccagcgtaccgccttcgagcagctttttatccgcccgcatacgcgcacaccgggcatcccgctgcgctggatcaccgccgccgatatcctcgcccagcaagccttattgcgacacccggattttgtcgtcgcccgcatgaaaggccagtactggcaggtgcgtgaaaaagtgttcgattacgaaggtcgttttcgtctggcgcacgaattacgcggttaatggtagttttgattgatgtataaggcgattgagtatagaatctcgcccgcttttgcatacgcaaagcagatcacttacctgttgctgggtcgcctgtagcaggattaatttaagagagaaagaaatgtttactatcaacgcagaagtacgtaaagagcagggtaagggtgcgagccgccgcctgcgtgccgctaacaagttcccggcaatcatctacggtggcaaagaagcgccgctggctatcgagctggatcacgacaaagtcatgaacatgcaagctaaagctgaattctacagcgaagttctgaccatcgttgttgacggtaaagaaatcaaagttaaagctcaggacgtacagcgtcacccgtacaaaccgaagctgcagcacatcgacttcgttcgcgcttaattgctgaataagttgtaaaaaaccccgctccggcggggttttttgtatctgcagattatgcctgattacggtattgctattttttgcaggccagataaggcgttcacgccgcatctggcattcagaacacaaaaccgattaattgccgccagacgtccggcgctgcaattggtcgcgcaaattcggcggcgtgcctttaatggtcaaggtatcggttgctggatcccagaagatgcgttcacctaacagcatcgcatcaaagttaatagtcaagccaccgccgctaccggcaaacttcgtcaactgacgcagtgtgctacggtctgccgggaagctctcttccagttcgtagcctttttcagccgcaaactccgtgaagctcacttcgcttacgcctgccagctctttgctcaggcttttcagttcgatctcttcgcctgcctgcagctgctcattacagtagctataaacctgctggcgcacgttctgtcgctctgctttatccagttgtgcttcggcagtgaaatcatcaaccgcttgcaacagcccacggttttgcgctttcgcgtttaacccttcgctggccccgaggaaatccataaagaaatccgccactttgcgccctactcgccctttcaggaaagtgagatagcgggtggactctggattggtttcccattcggttaaatcgatacgcgcaacaatatccgcatgattgatatcaagataatgggttgggttgatgtcgagattttcgttaacgcgcatactgctcaggttgctcagaactgccaccagcaaatactccaccgccagatagcgatagtggcaaaacagcacgaatccaccgtcagcaaaaggatatttcgctaattcgtcacgcaggcggccggttgccgcgcggctaaatgccaggaagtcctcttcgccctgacgctgtaagcgcagcgtctgcgccagttcactctcttcgctaaacaagccgtaagctttatttttggcgctatagacccgatgcagttctgccaccatctcaacgacggtttctgtcggttccagcaaactatcgcgcaacaccagctcaaggttctgctcatcacgcttgataagctggtgcagagcaatctggttgatatccagactcatgataaactctcctttaagaccgggcggtattcaaccaccgccggttaagcgacgcaataaaagatggcggtcattttacagaaggcagcgtaacgagaatgatttaacgcataaaaaagcagaaaaaaaaccgttgctacggtaatatgttgccctttcatcaactaactgatttcgatttatgccacaaatttcccgctacagtgatgaacaggttgaacaattgctcgcagagctgctcaacgtactggaaaaacataaggctccgaccgacctttccctgatggtgttaggcaacatggtcactaaccttatcaacaccagcattgccccggcccaacgccaggcaattgccaactcttttgcccgcgccttacagtcctctatcaacgaagacaaagcgcactaagggaaacagataacaggttatggtaactcatcgtcagcgctaccgtgaaaaagtctcccagatggtcagttgggggcactggtttgcactgttcaatattctgcttagcctcgtcattggcagccgttacctgtttatcgccgactggccgacaacgcttgctggtcgcatttattcctacgtaagcattatcggccatttcagcttcctggtgttcgccacctacttgctgatcctcttcccgctgacctttatcgtcggctcccagaggctgatgaggtttttgtccgtcattctggcaacggcgggaatgacgctattactgatcgatagcgaagtctttactcgtttccatctccatcttaatcccatcgtctggcaactggttatcaacccagacgaaaatgagatggcgcgcgactggcagctgatgttcatcagcgtgccggttattttattgcttgaactggtgtttgcgacgtggagctggcaaaagctgcgcagcctgacgcgtcgtcgacgcttcgcgcgcccgctggccgcattcttatttatcgcctttatcgccagccatgtggtgtatatctgggccgatgccaacttctatcgcccgatcaccatgcagcgcgctaacctgccgcttagctacccgatgacggcgcgacgttttcttgagaagcatggtctgcttgatgcgcaggagtatcaacgccgtcttattgagcaaggtaatccagacgccgtttccgttcagtatccgttaagcgaactgcgctatcgcgatatgggcaccgggcagaatgtgctgttgattactgtcgatggcctgaactacagtcgcttcgagaagcagatgcctgcgctggcaggttttgctgagcaaaatattagcttcacgcgccatatgagctccggcaacactacagacaacggcatctttggcctgttctatggcatcagcccgagctatatggacggcattctgagcacccgtacgcctgcggcattaattactgcgcttaatcagcaaggctatcagctggggttattcagtagtgatggctttaccagcccgctgtatcgccaggcattgttgagtgatttcagcatgccgagcgtacgcacccaatccgacgagcagaccgccacgcagtggatcaactggctgggacgctacgcacaagaagataaccgctggttcagctgggtttctttcaatggtactaacattgacgacagcaatcagcaggcatttgcacggaaatatagccgggcggcaggcaatgtcgatgaccagatcaaccgcgtgctcaatgcactgcgtgattctggcaaactggacaatacggtggtgattatcactgccggtcggggtattccactgagcgaagaggaagaaacctttgactggtcccacggtcatctgcaggtgccattagtgattcactggccaggcacgccggcgcagcgtattaatgctctgactgatcataccgatctgatgacgacgctgatgcaacgcctgctacatgtcagcacacctgccagcgaatatagccaaggtcaggatttgttcaaccctcaacgccgtcattactgggttaccgcagcggataacgatacgctggcaattaccaccccgaaaaagacgctggtactgaacaataacggtaaataccgcacttacaacttacgtggtgaaagagtgaaagatgaaaaaccacagttaagtttgttattgcaagtgctgacagacgagaagcgttttatcgctaactgattaattataaatcagttagcgaaatatcttacttgcaatcggtgtggaaaacggtagtattagcagccacgagtcggcacgtagcgcagcctggtagcgcaccgtcatggggtgtcgggggtcggaggttcaaatcctctcgtgccgaccaaaaatcccaagaaaaaaccaacccttacggttggtttttttatatctgcaattaattcgataaacagaccgtgacacatcacagcctgtttattttctgttatcagaacgtcctgagctttcatcctatgaaattaattgctgttaaaagcattgggtacagaaaatacccatagctccatacccggagtcagtttttaaaaactgtttaaagaaatgcacaagtattgtgattgattttttagttgtttttcttgatgagaagctgatgcaaaattccgtctttataatgaaaatgatgccaaagcgaacgacaaggttgtagttttcactacatgtccatacataaaatggggtaacattcacgcgcctggtagcgttaccaacgctacgctcaaacataatgattctaataaaacctcaggagactactatgcctgaagcaacaccttttcaggtgatgattgtggatgatcatccacttatgcgacgcggtgttcgtcagttactggagcttgatcctggctctgaagtggtcgccgaagcgggcgacggcgcgagcgctatcgatctggcgaatagactggatatcgacgtgatcttgctggatctcaatatgaaaggtatgagtggcctggatactctcaatgccttgcgcagggatggcgttaccgcgcaaattattatcctgaccgtatccgatgcctccagcgatgtctttgcgctgatagacgcaggcgcagacggttatctgttgaaagacagcgacccggaagtattgctggaagcgattcgtgccggagcgaaaggcagcaaagtctttagcgaacgcgtcaatcagtacttacgtgaacgtgaaatgtttggcgcggaagaagatcccttcagcgtgctgacggagcgcgagctggatgttctgcacgagctggcacaggggctgagtaataaacagattgccagcgtgttgaatatttccgagcagacagtaaaagtacatattcgcaatctgctgcgtaaactcaatgtccgcagtcgcgtggcggccaccattctgttcctgcaacaacgcggggcacaataaaaatagcccgatggatttatcatcgggctgagatttatgacaaacgcaaaactgcctgatgcgctacgcttatcaggcctacgtggatcgatcaatttattgaatttacacaattttgtaggccggataaggcgttcacgccgcatccggcataaactaagcgcactttgtcaacagtctagcccgatggcatcaccatcgggcctctttttatttactctcctgcgggctcaaatgttgcatcgcctgcgcgatactacgttcaatcaccgcacggcgagtatcgttggcaggtaagagtttcaacatcatctcccacgcggcaacggcttcgccaaatcgctgctgctcaaaggcattaaacgcatacatgcttagcacacggatattgctatggtccgttctcaccagctgacgtagcagttcaccgccgaggcggttgtcgttgggatcagaactacgagtcaacgcttcagcgtatcccagtgcagcatcactgtttttcggatcgaggcgatacgcagtggcgtatgcatcggtggcgatactggcgttacccagcgccatgccaacgcggcccaacataatccagccttctatatctcccggatttttttgcagttgagtacgcatccccagcgcaagacggctcatctcttcttcgttgagcggatcggctttcggatccagcgccctgtccagcaacgccggagcctgtgccgtggcctgctgccagattttcacctgctgataattgccagtctggtagtagctgacgccagccacaattaacgccaccacaatacccggcagataaacaacatatccggcacgcttaccttccggcacgctttgttcaggaaacgcttccggcaccacgcgtacccgacgccggctgcgggcgtatatgacccaaccgccaatgccaatagccactactggcagcacccacagcagcacggtcagcggcgttaacggcggatcgtaagtgacgaagttgccgtaacgcgccaccatataatcgacaatctcttttttacttttaccttcctgcatcagttcatacactttctgacgcaggtcggtggcaatcatgctgttggaatcggcaatgctgttgttctggcatttcgggcagcgcagttcttcagtgagctgacggaactgttgttcctgtgcttcatctttaaactgcaacacatcgatggtcgccagcgcactgccggagatcatcagcatcagcacgcccaataaaaacctcattgtgcggcctccttactgtatttctcccacagcggcttgatctcttcttcccagacgcgaggattcagatcgcccgcatggcgatagcgaatgatgccgttgccgtcaataagaaacgtttctggcgcgccatagacaccgagatccagccctaacatgccatcgccatcaaacaggcttagcgcgtaaggattgcccagctctttcagccagctgattgccttctggcgatcgtctttatagttcatgccgaccacgcggatgccctgcgcagaaagctgattcagatattgatgttccgcacggcaggtcggacaccaggtcgcccagacgttaagcagtactggtttgccctgagtcagcacatccgcctgataaaactgccccggattgtccagactttcgagacgaaacttcggcacaggcttgccaatgagcgcgctttccagattggtcggatcatccccttcggcattacgcgccagctgccacagcagcgccgcggcaatcgccaggaagataatcaacggaattaacaatactttgcgcttcatacggcctccggcgcagttttttgcggactcacgcgcttacgatagcgaggatcaaacagacacagcagtccgcccaacgccatcatcagcccgcccgcccaaatccagcgaacaaatggtttgtagtaaagacgcacggcccacgcgccgttttccagctcttcaccgagggccgcgtacaggtcacgcgtgatgccgccgtcaattgccgcttcggtcatcatgctcccggcagtgttgtaataacgtttttccgcatacagcaccgtttccggcttgccatcgcgcgttacgccgatagtcgccacaccgccacgccagttcgggccagtcacctctttgacatcacggaaggtgaagcgatattcatgaatatcgacgctatcgccggacttcatgcgcacatcacgctcaacgctatagttctggctaaaggcaatgccaacaattgtcactgccagcccaaggtgagccgccaccatcccccaataactgaaggtggttttcgtgccgcgactaatacgtagcgcagcttccgcaattgccagcaccgcaatccagcaggccattgccaggccgagcaccgtcatcgccacaactttgctttcgaacagccacggcaacagcaggctcagcaccagcgtagagatgaaggcgataatcaataaattgcggatcttacgcgggcgatcccgcccccagcgcaccagaggaccgacaccaagcagtagcgcaaacggcaccatcagccaggtaaacatggtgttgaagaacggttcgccaatgctaatactgcccagtcccagttgcttatgcaccaacggcagcagcgtccccagcaacaccaccagcatcgcagcgaccagcaaaacattgttcgctaacagcaaagattcccggctccacagcgcattgtttacgcgactgcgaactttgtgtccacgcgcggcaaacagcagcaggctaccgccaatcaccagcaccataaaggcgaggataaacataccgcgcgccggatcagacgcaaacgcgtgtacgcttaccagcacgccggaacgcacgaggaaagtccccaacagacacaagctgaaggcactgattgccagcagtaatgtccacgctttgaagctggcgcgttgttcagtgaccgccagactgtgcatcagcgcagtccccaccagccacggcataaagctggcgttttctaccggatcccagaaccaccagccaccccagccgagttcgtaataggcccatgcggaaccgagcacgatgccgagcgtcaggaagatccacgctgccagcgtccacggacgagtaaaacgcgcataagtgctgtccagacgcccgctcagcaaagaagcaatggcaaaagcaaacgccacgctgaaacccacgtaccccatataaagcagaggcggatggaagatcagccccggatcctgcaatagcgggttaagatcgcgaccttcaatcgggaagttcggcaacgtgcgagagaacgggttagaggtaaagagaatgaacagcaaaaagccgacactgaccatccccattatcgccagtacacgggccacaatatccagcggaatacgctgactaaaaatcgccaccgcaaaggtccagccgctcatcagcagcacccacagcagtaggctgccttcatgcgcgccccaggtagccgccacgcgataccacaccggaagctgggtattggagttgctggcaacataggtgacggtgaagtcgttgaccacgaaagcattgaccagcaccagaaatgcgccagccacagacataaacagcagccaggcaaacaagcgggaagacgccatcatgcgcgcatctccgcgcgccacgccccatagcggatacacggacagcagcagcgcaattcccagcgccaggcacagcagtccgttaccaatttctggcatcatgatgctgggtccttataaacttacgtcaacttgctgggtccttataaacactcgccgggcgacggtggttagcttccatcgctttctcaacttctggcggcgtatagttttcatcgtgtttcgccagcacttctttcgcgaggatatgattgcctttttccagttcgccctgcaccacaacgccctgcccttcacggaacagatccggcaaaatgccttcgtaagagacatccacactgccttcagcatcgtaaatggtgaaggtcactttcaggctattgggatcgcgctgcacactacccggcatcaccatcccgccaacgcgcagacgctgaccgacttccggcatttgctgagtttcacgcttgccgtagagaatttcccccggcgtataaaagagatcgatattgctgcgcagcgcatatagcaccagaccgatagtcagcgccagccctgccaacacggcacaggcaatccacaagcggtttttacggcgaatattcatgcagcctcctgctgttgcgcagcacgtaaacgcgcctcacgcgcccgctgttgcgccacgccacgcagaattgcgcgatgttgcatcacgctgtgcacgaccaaaaccaccagcggaataacggtcatcaccaccgccagccagacaaaaaaggcgtaaccgcccattgcgaaaaattcattccaggaagcaaatgcaggggtcatttacggcctcttttcagtatcagttcactcacccacggacggcgtttttccatcagcaaaatcaaattacgcatccgcatcagcgtcagcgtggcagacaggagcaggaagccaaaaatgctccagcgcagcgggctacgcatcgccggatcgatactttgctgcatccgcgtacttccctgatgcagggtgttccaccactccacggagtaatgaataatcggcagattcaccacgccaatcagcaccaggatacctgccgcacggcccgccagacggcggtcgtcgaaggcgtgccacagggcaatcacacccacatacaaaaacagcagcaccagttcagaagtcagacgtgcatcccatacccaccaggtgccccacatcggttttccccatgcagagccggtaaccagggcaataaaggtaaacacggcaccaatgggggccatcgccgccaccgccaggttggccattttcatctgccagacaaggccaataaacgctgccactgccatacttgcataaatgcccatgctccagatcgccgcaggcacatgcaggtagataatgcggtagctatttccctgctgataatcagccggagcaaagccgaatccccagatccagccgacggtaagcacgaccacactggcaattgccagccacggtataaaccagccacagatttgatacagccgtggtgggatcgccagttgatgcagtgttttccacatagtttcgataccagactcgaacaaaaatcagtaatccagcgttattgaatgctgattcgtaacgctgccgccgtcgcaaaaggacttaatgtcgcggtgcctgccagcaacgcgcctaaaattgccagatacccgtcaacgggcaaatgcatagaagccgcgtccatcgcggcggtggcaaagatgagtaatgggatagtcagcggtaacaccagtatgctgagcagcacaccaccgcgcttaagtcccactgtcagcgccacgcccggtgcaccgagaaagccaagcgtaggcgttcccagcagcagcgtcagcgccatcacttgccagccataaacatccattcccagtagcattgctaccagtgggctaaggatgagtaacggcagaccggttaccatccagtgcgccatcaccttcgccagcacaacggcgggcaagggtaacggcaacaacatcaattgttcaagactgccgtcctgcaaatcgtcacggaacagtcgttccagcgccagcaaggaactaagcagcgcagcaacccagataatgcccggtgcaatacgcgccagcagttgcggctccggaccgatactgagcggaaaaagggtaattacaatcaggaagaaccacagcgggttggcgatttcggcgctatggcgaaacgctacacgcagctcaagacggaaaatgcgccagaacatcatgcggccctcgtttgcgtcagactaatgcggcgaattttactttcagcaacgttgagcggctggtgggtagtcagaatcacaatccccccctgctccgtatgctgcgccatacgctgggtcagacgatcgacaccgttaacgtcaatcgcggtaaaaggctcgtcgaggatccataacgtggcacgggtcagccacagacgcgctaaagcgacgcggcgttgttgcccggcgctgagctgatttacaggaatatcttcgaatccggcaagcccggcctgcgccagggcttccagacattgtgcggtatcgccatcgcgatgataaaagtgcagattttctaacgccgtcagccgggttttgatccccggctgatggcctatccataacaggttttgatggtagctgtcgcgtacctgatgcaagggctgcccttgccagagaacctcgcctgcgtcagggcgagacaaccccgtcagcaaacggagaagcgttgtcttccccgcgccgttgctaccggtgatttgtacccactctcctgcgttcagcgtaaaactcaagccactaaataaggttcgttcatcccgctcacaaagtaactctctggcttcaagcatacccacgcaataaccctgttaaaaacctggctcgacttcacgcatatcgggcagcttgtgcgctatccctttatggcaatcaatacaggtttgcccatctttcaccgcctggtcatgcatcttcgcggcaacgcttttctgggcggttgtatccatatactcgaagttgtgacagttacggcactcctggctgttattgtccttcatgcgccgccactcattctgtgccatcgtcagacgatgagcttcaaatttctgcggcgtgtcaataacgccaaaaattttaccatacagctctttacttgctttgagcttgcgtatcatcttcggcacaaactcgtgcggaacgtgacaatccggacaggtcgcacggacgccgctacggttgttgtagtgcacggaatccatgtattcctgatacaccgtgttgcgcatttcgtggcagctaatgcagaactcttcggtattggctttttccatcccggtgttaaagccaccccagaagacgatgccgccaacaaaaccgatcaacagcagcgtccccagcgccagacggctgggggtacgccaccatttccacaggcgcttaatcagaccaggcttacggtcagaatttcccataataacctcttatttcccgtaacctttacttggggtaaaggtattccccacgattggcgcggtatcggcctgcggtacgtgacattgcagacagaaataacgacgcggagccacttccgcgcccactttgccgtcgctgtccataaagtgagtaggactgatacgcggcgcgccagtggtgcgatagctttcgacaccgtggcactgcaagcagcgattggtattggtcgttacctgataaccttcaacgctatgcgggatcattggcggctgattcacatagttcagcggcatccgatcctgctcttttggcatccgaatggccccttcctgtgtcccggatacttccgggctctggctaaaatcgacgccattagccgcccaaaccgcgccgcttaccaccagggccagcatcgccgtccattgacacagcgctttcttcaggtcatggcttttcatgatttcgctcccgaactccattatgtcaacttttcgctccgctactccatcgtgtagttattgtaaatacatcctcagaacagacatccacgcagcgaccgcacgtcatgcaatcgcggctggtgacctgcaccgggctttgttcatccagcaccggggcacgtagcacatgcggttccgggcaaacatgaaaacaatccatacagcggttacatttctgccgatcggtggccgcaacggtaatcacacctttgctacccagcacgccatacagcgcgccaaccggacaaatgtgcccgcaccagccgtgttcaacgaccagtagatcaaataaaaacagcgcgagaataagcagcgcgccgctgccgaagcccattaccaggctacgccccatcagagaaacggggttgatccattcccaaatgagcgtgccagttaaggcacttcccaccagaatgaccaccaacagcacgtagcgaatgtggcgagggatcgtcgcagactgattgaggtcaaagcgcctgcgtaaccagttcgctaagtcggtaatcgggttcagcgggcagacccagctgcaaaataatcgctttcccgccagggcgtagagcacggtgataatcaccgcaccggtcaacgccaccgtggcaggcagatgaccactggcaagactttgcagcgtcatcagcggatcggtcagcggaacggtgtcgaataacaggctactgctgtagttgccgtgcaagatccacacaccaaaccatggaccgctcaaaaacatccccagcacgaagaactgacaaaggcgacgtaacaccagccaacggtgactgcgccaccagccttttttctccagcgcctcgcgcccggcgtcacgtttacgatttgccattgttcccctccagccagccgttacttagcttttgccattgttcccctccagccagccgaagcggtaatggtgacctaactcccctttcgccagactcagcggtaacaccttgattgccggttgttccagcacgcatactttttcgcacttaccgcaaccggtacaggcgtcgctgtgaaccgtcggcagaaagcgggcgtgcttaccggtacgcgtgttgcgctccagctccagggtgatggcctcatcaattttcgggcattcgcgataacaaacatcgcagcgcagcccctgaaagttgagacagttttcctggtccaccagtaccgccagccccatccgcgcgtcgtcgatgctttcaatctcacgatccagcgcaccgcttgggcacactttggcgcacggaatgtcctcacacatttcgcaaggaatatcccgtgcgacaaaatatggcgtgcccgcgctcagaccagaggccagcgtcgccagttttaaggtgtcgtaagggcaagcctgaacacactgaccgcaacgcacacaggcactggcaaaggcgttctcgtttatggctccgggcgggcgcaaccgcacgccagatgcgcgtgcggtttgctgttgtaaccccagcgccacacccacggcagccagcccgcctgctgtgcgaacgacatcgcgcagaaagcggcggcgaccattttgaggtttcgcactccgggacataatggcttacaccttctccagtttgaccgcgcacttcttgaagtccgtctctttgctgagcggatcggtcgcatccagcgtcagtttgttaaccaactgtgcggcgtcgaagaacggcatgtacaccaggccctgtggcggacggttacgaccgcgcgtttcaacaatgctgatcacttcgccacggcgagaaaccactttcactttgtcgccacggcgcagatcgcgcgctttcgcatccagcgggtgaataaacaggaccgcttccgggaaggcgcggtgcagttctggtacacggcgagtcatactgccggtgtgccagtgctccagaacgcgtccggtagagagccacaggtcgtactcttcatccggtgcttccgccgccggttcgaatggcagtgcgaagatcaccgctttgccatccggtttaccgtagaacttatagccttcgcccgctttcacgtacgggtcgttaccttcgctgtaacgccactgcgtttctttaccgttcaccaccggccagcgcagaccgcgcgctttgtggtagtcatcgaacggtgccagatcgtgaccgtgaccgcgaccaaaccatgcgtactcttcgaacagccctttttgcagatagaagcccagctcgcgggattcatcgttcagctgatcttccgccagttcggataccgggaatttgctcacttccggtgtggcatacagcacttcgtacagcgttttgccacgcagttccggtttcttcgccagcagatcttccggccatacttcttcagttttgaagcggcgggagaactggactaactgccagagatcgcttttcgcttcgcccggtgcctgtacctgttgacgccagaactgagtacggcgttcggcgttaccgtaagcgccctctttctctacccacattgcggtcggcaggatcaagtcggcggccagcgcactgactgtcggatacggatcggagacgatgatgaagttgcgcggatcgcgccagcccggcatacgctcttcattgatgttcggcccggcctgcatgttgttggtacacatggtccagtaaacattcagtttgccgtctttcagcgcacggtcttgtgccaccgcgtgcagaccgattttcgccggaatggtgccgctcgggatattccacttcttctcgcagatatcacggtgtttctcgttggtcaccaccatgtccgcaggcagacggtgagcaaaggtgcccacttcacgcgcagtaccacacgcagaaggttgcccggtcagggagaacggaccgcaacccggctgggaaattttgccggtcagcaggtgcaggttgtagaccaggttgttagcccacacgccacgagtatgctggttgaagcccatcgtccagtaggagatgactttcttgttcggatcggcatacagctgcgccagttgttctaactggtctttcggcacgccggtcatttcggcagttttttccagcgtatactcggcaacgaaggctttgtaatcttcaaagctcatcggttcggaggcgtcagaacccggattcttcgctgctttttccagcggatgggtcggacgtaaaccgtagccgatgtccgtcgcccctttgcgcaggttaacgtgcttgctgaagaagtcctgatttatcgcattgttttgaatgatatagttggcgatgtagttcaggatcaccaggtcagattgcggcgtaaagatgatgccgttatccgccagctcgaagctacgatgctggtaggtagaaagcaccgccacggtgacgttctggttagagagacgacggttagtgatgcggctccagaggatcgggtgcatttccgccatgtttgcgccccacagcacaaacgcgtcagcctgctcgatgtcgtcatagcagcccatcggctcatccataccaaaggtacgcataaagccaactactgcgctcgccatacagtgacgcgcgttcgggtcgatgttgttgctacggaagcccgctttaaacagcttggacgcggcataaccttcccagatagtccactgaccagaaccgaacataccgatgctttccggccctttttctttcagggcggttttgaatttctcttccatcacatcgaaggcctgatcccaggtgattggggtaaattcgccttctttgtcatatttaccgtttttcatacgcagcagcggctgcgtcaaacggtctttaccgtacatgattttgggcaggaaatagcccttaatgcagttcaggccacggttaaccggtgcgtccgggtcgccctgacaggccaccacacgtccctgctgcgttccgaccagaacgccgcaaccagtaccgcagaaacggcacggcgctttatcccatttgatggcttcctgctgaccaacaacggcgcgggcaacgcccggcacgctgagaccggcagccgccgcagcggccgcaacggcgttagctttcataaagctacgacgactgagtttcatggtgtttcctcaccttgctcttcctgctggtgataaaccaggctcaccgccagcacgccctctacgttgcgtacactctcaatggtttggatcagcgtttcgctgtcttctgcttccaccaccacaatcaactgaccgctcggcgcgtcgctgacagcaacttcacagccgggaaaggcgttcagttgggtgctgatgtcactaattcgttcgcttttggcctgcacgaccaggctgcaaacttgccagttagtgtgcatggagatactccgcagttatggcacttaccggacagctggctgcacatgctccacatccgttgcaaagttggctattaagttgcggctggtagatcccggagagcgtcgggcgaaagataattgccattggctcacagctatcctgacagcggcggcattcaacactctgatacgccaggcacgcgtccccgatggtgaactgcaaatcccaggccctggtgtggcgcggagaaaataggctttcggggcaagcctgcgcgcaggcgtaacagaagctgcactcgttatttttgaaattaacgctcggatagccgcccgcgccgcgttgcagaatgttgttttcacaagcattaatacaggcgtcgcagcgggtgcaatgggtcagaaaatgagattcatcaccggaccagggcggacggataccgttactggctttgcgccagcgaccagtgagtatgccccgacgggatgcatcaatcttcacattgaccttccatcattaacgcgctctgaaaattgagagcgaccaaataaaccgcataattaataagccatttttatagccgctaagatattaaaggatgtgtcaaagatgcataccccgatcggggtaaaacctgtagcaggatcaaaagagtggcgggaagcgtggcaaaaacgggcttttgctcacatttcaaatggttataaatatatttatatagcgattgattcaccagagatatttctgctggtttgctctctcattagaatttaacactaaaagagcaggtaaaattgtctgaatgttctttaagttattcataaagcaaattaataaatctgatgaatatgttaaccttcagcgacatcatcggtgaaaacctataaatgaagaaggaaagcaaaaaaatgaagaccattctacctgcagtattgtttgccgctttcgctaccacttccgcctgggcggcagaaagcgtccagccactggaaaaaatcgcgccttatccacaagctgaaaaagggatgaagcgtcaggtgattcagttaaccccgcaagaagatgaatctaccctgaaagtagaactgttaatcggtcagacgctggaagtcgattgcaatttgcatcgtctcggcgggaagctggaaaacaaaacgctggaaggctggggctatgattattatgtctttgataaagtcagttccccggttagtacgatgatggcctgcccggatggcaagaaagagaagaaatttgtcaccgcgtatctgggcgatgctggaatgctgcgttacaacagcaagctgccgatcgtggtgtatacgccagacaatgtagatgtgaagtaccgcgtctggaaggcggaagagaaaattgacaacgcggtagttcgctaaactgccgtgaagtgcggcaccccgtaggtcagacaaggcggtcacgccgcatccgacatccaacgcccgagccggttgcctgatgcgacgctggcgcgtcttatcaggcctacaccgctgtgaagtgcggcaccccgtaggtcagacaaggcggtcacgccgcatccgacatccaacgcccgagccggttgcctgatgcgacgctggcgcgtcttatcaggcctacaccgctgtgaagtgctccaccccgtaggtcggataaggcggttacgccgcatccgacatctaacgcccaagccggttgcctgatgcgacgctggcgcgtcttatcaggcctacaccgctgtgaagtgctccaccccgtaggttggataaggcggttacgccgcatccgacatccaacgtccgagccggttgcctgatgcgacgctggcgcgtcttatcaggcctacaccgctgtgaagtgctccaccccgtaggtcggataaggcggttacgccgcatccgacatctaacgcccaagccggttgcctgatgcgacgctggcgcgtcttatcaggcctacaccgctgtgaagtgctccaccccgtaggttggataaggcggttacgccgcatccaacatctaacgcccgagccggttgcctgatgcgacgctggcgcgtcttatcagcatacgccacatccggcataccatgccggatgtggcgtatcattacaacgcaatatccgccacttctttttgaacgggttgcggtttcaactgcggtttcggcgtactatctgctgcctgcggcttgtcgtagttcaaccccagcacttcgctggtgtactgcaactcgcgttctgttgccgctacatcaccgttcagcttgcgtccataagacggaacgatcgctttcaacgtagcctgccattgcgggctggaaacacgatcgccaaatactttttccagcagattcaacataatcggcgcggcggtactcgcccctgggcttgcccccaggagcgcggcaatggttccttgctggtcactgacgacttcagtacccagacgcagtacgccacctttctcggcatcacgcttgataatctgcacgcgctgccccgcttgccacaaacgccagtcctcttttttcgcctgcggatagtactctttcaacgcttcaaaacgatcctcttcactcaacatcacctgactcaccagatatttcaccagatcgaaattatccagcccgacgtgcatcatcggcatcacgttagaggtggtggtggaactcattagatcccacaaactaccgtttttgaggaatttggtactgaaggtggcaaatggcccaaacagcactacgcgtttaccgtccagaacgcgggtatcgatatgcggaacgctcatcggtggtgcgccaacggatgctttaccgtaaaccttcgccagatggtgattaaccacgtccgggttttcgctaacaaggaactgtccgcccaccgggaaaccggcgtagtctttcgcttccggaatcccgctttcctgtaacagcttcagcgccgcaccgcccgcgccgataaagacaaatttggcacgaatgttctgtgcagtgccatttttcagatcggcaacggtaacggtccaggtgttatcgtcattacgctttagggcgcggacttcgctgctgagttgcaggctgaagttagatttcttctgcaaggaagcaattaactggcgggtgatctcgccgtagttcacatcggtaccaatttccgtacgcgtggctgccactttctgttgcggatcgcgcccttccatcactaacggtgcccactctttgatctgcgcgtgatcttcagagtaacgcataccgcgaaacaggctgctttgttgcaacgcggcgtaacgggcgcgcaggaaattgacgttatcctcgccccagacaaagctcatatgcggaacggtattgataaaactacgcggagtacgcagcacgccgcgctcaacctggtgcgcccagaactggcgggaaatctgaaatgcttcgttaatggcgactgctttttcaatactgatgctgccatcggcgttttgcggggtgtagttcagttccatcagtgcagaatgcccggttccggcgttattccagccgttgctactctcctgcgcgacaccctccaggcgctccaccatggtcatgctccattcaggctccagctcgcgtaaataggtccccaacgtggcgctcataatgccgccgccaatcaacagtacatcagtttcctgctcctcggacgctttcgcttttgccgccatgctaacggcattaagccccacggccatgctgaagagcatggcagtcacttttttcatcttgttaatgccttacttttagtcgctttattgcaggtgagatttgcgcggcatcaacggtaacacttaagtaacaacatttaaataatgtttataaattatattctaattttagaaacattataatttcgttgattaattatagggttattagaaatgaagggatttttagcatattgacctgacggcagcagtccgccaggtcagcgtcgtaatattatgccgtccgggcaacggcatcacggctagcggcatcgcgctcttcgcccgtcagctcgctaagttgcccattgcgcatttccagcaggcggtcggcgtggataaagtaatgatcatcatgactgatagcgaaaatagttttacccatctcctgcatcagcggcagcaacacctgataaaactcacgacggaagtgtggatcctgatccgccgcccattcatccagcaggataatatcgcgttcttctgccagcgccagcaacagcgccacgcgttttttctgccctttacttaacttcaggttaacaatacgcccgttgcttaactcaagcttatgagccattttcagctgcgccagccacttctcaaccagttgcgggttagcgggtttaccctccggccccagcagttgatcaaacagccagacatcggtaaacactgcgctaaacagtttgcgataatcttccggttgttcgccgctgacaggtttgccatccagcaagatttcgccgctttgtggctgatacaagcccgtcaacaacatcgccagcgtgctttttccgctaccgttgccgccaatcagaaacagcagctcgccacgtttgatggtgagattaatcggaccaacggaaaacgcgttatcctgataagcaaacgtcacgttacgcagctccagcgtttgccagttgggaaacgcctgcgggcgcggaaactctgctttgaaaggcgcgagcgcgaatttgttcagcttgttaaacgccacctgcgccgtcagcagcgtcggcaatgcgccaaccgcgctaagcagcggcgtacgcaggaataaaagcgtcaagctataggtcgcggcaacgttggtatcagcccaaccgaggctgttcgccatccagaacaccaggccgattgcgcccagcatcatgatgttactccagttcacggcactaagatggaaggtgtctgcgcgaataatatggtggcgatactcttgcgcatcaggaatgtagaggttgttaaacacatactcggcgcgttcccggttcagagtcagctctttgcgcccttcaagtacagtttgaaaatccgtgtacagcttgtcttcggtttcacgcagggtcgccatatgtttgtacacccgcgccaccagcacaaaaccgccccagatggtgatcgccatccagatagccgttaccagcaacattttgccgctcagcatccacagatacgccgcactaccgatagtgagaatgatcccctgcaccagttccggcagacgcacaaaagcaatggtgatattgcgcacatcgctggttaaccccgccagcaagctggcgctaccgagttgttcaatgcgctcgacgtgagtatccagaatccgcttgataaattcactacgcagtcggtaaacgaagtgatgccccaaagtggtgagcgccagttggcttccgagagtgactgccatcaacagcagcaataatcccagaaactccggcaacaccagcagactggtatccgccgtttcgataaggcgctgattgataaaagcaattaagccaatgcctaatgccgcactggcgaggcttagcgccatcacactgataaatggccagcgatactgccgccagacaagtacaagaagttccatgcagaaaacccggacaatgaattacagcccgcagtttaaacatcttcgcgcgcacagcaataataattcttatttttattcttttttacctgcctgacggaatgtcaggttgtagcggcagtcgatggtgagtggatgaaaccccgctttcaacggttgaataccgtgataaaacagccggctttcaccgccccataccaccacatcgccatgttccaacaacaaacgtttgagcggatcatttcgtttcaggccgccaaattgaaaaatcgcgggtaagcccagagaaacagaaacaattggcgcgcgcagatccggttcgtctttatcctgatgcaggctcagtttcgcgccaggagcgtagcggttgataagacaagcatctggctggaaatctggatagcccgccgccgtagccgcacgttgacataaattatgaaaactctgtggcatggcgggccacggtttatttgtttgcggatcaatggggctatagagataaccttgccgatgggtcgtccagcccagatgcccacagttggtcatcgccacgctcatggtatatcccccgggggtgaccatctggcgaaacgggctctggctggcaacgtcattaatatcgcggatcagttgctccgcagcgttaaaagcaaaacgccgtaaaattaccgcaccagccgccagtggctcttgccacggttcagcatcggcaaacagatccaacattacctctcctcattttcagcttcgcggcgcagcagttgcgctttacggctcacgccccagcggtaaccggaaagtgtgccatcaccacggaccacccgatgacagggtattatgatagccagcttgttggcggcacaggcgctggcaacggcccgtaccgctttcggtttgccgatggcgttagccagttgctgataactgacggtttcaccgcaaggtatcgtgcgcagtgcctgccagacttgttgctgaaaagcagtgccgcgaatgtccagcggtaacgtcagcggcgtatcgcgttgattgaggctggcgatcacttcacgcacatgttgctgaaacatcagatcggcaggcgcgttgtcggcagcgggaaacatctgctgcaactcgctgattagtgtcgcgtcatcatcgcccagcaatatcgcgcaaatcccccgctcgctttctgccaccaggcaacgacccagctcacaatcagccagcgcgtaacgcaccgccagattttcgccaccgtgacggaattgtttagccgtcatgcccagcgtttcgtcagctttgcgatagtaactgctgctgtcggggaatccggcgttaagaatagacgtcgtcacgctctcccctttcgccaggctttcgcgcaaacggcgagcgcgccaggcctgttgccaggctttaggcgtcattccggtagtcgctttaaacaaccgatgtagatgaaatggactcatcgccacctggtcggctaaggcttccagcgttacaggcgtttcctgttccagcagtcgacacgcgtgggtgattttatccaaccgatgttgctgggcattggctttttctggctgacaacgtttgcaggggcgaaagccagcggcgagtgcctcgctggcatttgcgtagaaggagacgttttcccgcaaagcatgtctggcgcggcaagacggacggcaaaagatgcctgtggtacgcacggcgaaaacgaattcgccgtcggcattcgggtcgcgggctaagacagattgccagcgttgatcgtcagttaagcatgtggcttttttcataatcagctccctggttaaggatagcctttaggctgcccggtcaccatcacgcaaaaaccaacaatcttgcgctttaatttttttcgctgacaaggaagcttttaaactgtggactcatccaggttttaaagctatcgccttctttggtgatcatataaaccgccagcccttcccggcgaacaacctctttagctttctccggcccgagtaccatcaagccagtatcccaggcatcggcttccagcgccgtcggagcaatcaccgtcacggataccagattgtgttcgatgggacgcccggtttgcggatcgataacatgggaaagacgtttgccgtccagttcgtaatagttacggtagctgccagaggtgctaatcccatgaccgttgatatccaccacagcctgaaccgcgttttctttatcggttggtttttgaatcgctacccgccacggcaggccttcaccgttcataccacggctgttcagcgcgccgcccacgctcaccagatagcgggaaatcccttcctgctccatcaagcgtgccaaatgatcggccgcatagccttcgccgacggtggagagatcgacatataaatccggcaggtctttttgcagatattgctgatggctctgattgatgaccgtcaggtgctgtaagccggttttggctttcatcgcatcgatctgttcctggctcggaatttgaaccggctgttgttccgggccaaagccccacagattcaccagcggcccgacggttatatccatcgcgccatcggtcttcgcgccaatgcgcaggctggtggtgacgatatcggccatcgcttcacttaccggccacgggcttaaactttggctgtcgttaaagcgcatcagcgcggaatcttttttataggtgctaagcagctgatcgtcggcgtccagttgggtctgaatcttttctttaagttcggcgctgcgtttggcgtcaatgcccgggatgctggcacgccagaaggtacccatagttttgccttcaagaacggtaacttcagtagcgtgggttttggcgggttgtggtttttgatcgcaaccaacaaagaagagcgcggcagccagcagtgccacgcgggtaaagcttatttccatacgtgattatcctcatgcgaacggtcgcaagagtacaccaaaaaactgagtttgtacgctgaaaacaatgaaaaaagggcccgcaggccctttgttcgatatcaatcgagattagaactggtaaaccagacccagagctacgatgttatcagtgttgatgccagcgtcacgagtgaactggttgtcgtccagcaggttgattttgtagtcaacgtaggtggacatgtttttgttgaagtagtaggtagcaccaacatcaacatatttcaggatatcttcgtcgtcgtagccacgacccaggtttttacctttagactgcaggtaagccagggacggacgcagaccgaagtcgaactggtactgagcaacagcttcgaagttctgtgctttgttcgcccaacccagggaacctacgcgagttgcgttgtaggtctgggtgtactgagcagccaggtagatgttgttagcgtcgtatttcagaccaccagtgtaggtttcagcacggtcgccgttaccgatgtaagcagcggtgttctgagcatcagtacgtttggagctggagatcgcaccaccgataccgaaaccttcgtaatcataagtgatagaaccgccgacgccgtcgccgttttgacgcagtgcgtcacgaccgttgttagttacgccactagtaaagccttcaccagatgggttgccgtttttaccctggtactgaacagcaaagttcaggccgtcaaccagaccgaagaagtcagtgttacggtaggtcgcgaagccgttaccacgctgctgcatgaagttgtcagaaccgtaggtgtcaccaccgaattctggcagtacgtcggtccaggaagttacgtcataaacaacgccgtagttacgaccgtagtcgaaagaacccacatcctggaatttcagacctgcgaatgccacacgggtccaggagttgttttcgttttcagcgctgttgccctggatctgatattcccactggccgtaaccggtcagctggtcagtaacctgagtttcacctttgaagccaagacgcatgtaggtctggtcgccatctacatctttgttgtcagagaaatagtgcaggccgtctactttaccgtacagatctaatttgttgccgtctttgttgtaaacttcagcagcgtttgctgcgcctgctaccagcagagctgggaccaggagggacagtactttaactttcatgttattaaccctctgttatatgcctttatttgcttttttatgccactgcatactgattaaccctcattaatcagtcggcaagtccattctccccaaaaatgcagaataatccaacacgaatatgatactaaaacttttaagatgtttcatttatcgctatagatgtttcaaaatgtaaatgcaagggaactttttaagattattgcggaatggcgaaataagcacctaacatcaagcaataataattcaaggttaaaatcaataacttattcttaagtatttgacagcactgaatgtcaaaacaaaaccttcactcgcaactagaataactcccgctatcatcattaactttatttattaccgtcattcatttctgaatgtctgtttacccctatttcaaccggatgcctcgcattcggttttttttacccttctttacacacttttcattattctgtgctaccacagaaaaactataacgcttgttaactatttcacaaataattaacatccgcataatttccagcaatctttgtttatttgcaattatttttgttgggctttttgtaggttatttgtacagcaaaatggcgcttgtacatctatttcccccaatgcaggatgataaatatcacgggagaatagagaatcatcaatcaggtaagagtctggaatttcacactgtaccctttatactgccctatcacttcgcgaagttttaacaggtcataaacacgaatgcgtcagaaagagacaacggccacgacccgctttagtctcctaccggggagcattacccgcttctttttactgttgatcattgtgttactggtgacgatgggtgtaatggtacaaagcgccgttaacgcctggctgaaagataaaagttaccagattgtcgacattacccatgctatccaaaagcgcgtcgataactggcgttacgtgacctggcagatctacgacaacattgccgcgacgacctccccctcctccggcgaaggtttacaagagacgcgcctgaaacaggatgtctactatctggagaaaccacgccgcaaaacggaagcgttaatctttggctctcacgacaacagtacgcttgagatgactcagcggatgtccacttatctggatacattgtggggcgcagaaaatgtaccgtggagcatgtattacctgaatggtcaggataacagtctggtgctgatcagtaccctaccccttaaagatctcacctccggatttaaagaaagcaccgtcagcgacattgttgatagtcgtcgtgcagagatgttgcaacaggccaacgccctcgatgaacgcgaaagcttttctaacatgcgccgcctggcctggcagaacggtcattactttacattgcgtactacctttaaccagccaggacatctggcaacggtcgtggcttttgatctgccgattaatgatttgatcccaccgggtatgccgctggacagtttccgccttgagccagacgcgacggcaacgggaaacaatgataatgagaaagaagggacggatagcgtcagtatccactttaacagtacgaagattgaaatctccagcgcactcaactctaccgatatgcgcctggtctggcaggttccttatggcaccttattgctggatacgttgcaaaacattctgctgccactgctgctgaacatcggtttgctggcgctggcgttatttggctataccacattccgccatttctccagccgcagtacagaaaacgtccccagcacggcggtcaataacgaattgcgcattttacgggcaatcaatgaagagatagtcagtctgctgccgctcggcctgctggttcacgatcaggaaagcaaccgcactgtcataagtaacaaaattgccgatcatttgctgccgcatttgaatctgcaaaacatcaccaccatggcggaacagcatcaggggattattcaggcgacgatcaataacgagctgtatgagatccgcatgttccgcagccaggtcgcgccgcgcacacaaattttcattattcgcgatcaggatcgcgaagtgctggtaaacaagaaactcaagcaggcgcagcgtctgtatgagaaaaaccagcaggggcggatgatctttatgaaaaacattggcgatgcgctgaaagaacccgcacagtccctggcggagagcgcggctaaactcaacgccccggaaagcaaacaactggcgaatcaggcagatgtgctggtgcggctggttgatgaaatacagttagcgaacatgcttgcggatgatagctggaaaagtgagacggtgctgttctccgtgcaggatttaattgatgaagttgtgcctagtgtgttgcctgccatcaagcgtaaaggtctgcaactgctgattaacaatcatctgaaagcacacgatatgcgccgcggcgatcgcgatgccttacgacgtattttgctgctactgatgcaatatgccgtgaccagtacgcaattgggaaaaatcacccttgaggttgatcaggatgagtcctccgaagaccgcctgacgttccgcattctggacacgggagaaggcgtaagtattcatgaaatggataatttgcacttcccgtttatcaaccagacccaaaacgatcgctatggcaaggcggacccgctggcattctggctgagcgatcaactggcacgtaaactgggcggtcatttaaacatcaaaacgcgggatgggcttggtacacgctactctgtgcatatcaaaatgctcgcagctgacccggaagttgaagaggaagaagagcgtttactggatgatgtctgcgtaatggtggatgttactagcgcagaaattcggaatattgtcactcgccagttagaaaattggggtgcaacctgtatcacacccgatgaaagattaattagtcaagattatgatatctttttaacggataatccgtctaatcttactgcctctggcttgcttttaagcgatgatgagtctggcgtacgggaaattgggcctggtcaattgtgcgtcaacttcaatatgagcaacgctatgcaggaagcggtcttacaattaattgaagtgcaactggcgcaggaagaggtgacagaaagccctctgggcggagatgaaaatgcgcaactccatgccagcggctattatgcgctctttgtagacacagtaccggatgatgttaagaggctgtatactgaagcagcaaccagtgactttgctgcgttagcccaaacggctcatcgtcttaaaggcgtatttgccatgctaaatctggtacccggcaagcagttatgtgaaacgctggaacatctgattcgtgagaaggatgttccaggaatagaaaaatacatcagcgacattgacagttatgtcaagagcttgctgtaacaaggtagcctattacatgaacaatatgaacgtaattattgccgatgaccatccgatagtcttgttcggtattcgcaaaagtcttgagcaaattgagtgggtgaatgttgtcggcgaatttgaagactctacagcactgatcaacaacctgccgaaactggatgcgcatgtgttgattaccgatctctccatgcctggcgataagtacggcgatggcattaccttaatcaagtacatcaagcgccatttcccaagcctgagcatcattgttctgactatgaacaacaacccggcgattcttagtgcggtattggatctggatatcgaagggatcgtgctgaaacaaggtgcaccgaccgatctgccgaaagctctcgccgcgctgcagaaagggaagaaatttaccccggaaagcgtttctcgcctgttggaaaaaatcagtgctggtggttacggtgacaagcgtctcagcccaaaagagagtgaagttctgcgcctgtttgcggaaggcttcctggtgaccgagatcgctaaaaagctgaaccgcagtattaaaaccatcagtagccagaagaaatctgcgatgatgaagctgggtgtcgagaacgatatcgccctgctgaattatctctctagtgtgaccttaagtccggcagataaagactaatcacctgtaggccagataagacgcgttagtgtcttatctggcatttgcaccgattgccggatgcggcgtaaacgccttatccggcctacgattcccattatttcaacaaattacattaaagtaggccagataagacgcgtcagcgtcgcatctggcatttgcactgaatgccggatgcggcgtaaacgccttatccgtcttagctatcccggcttttcctgaccctctcggcatataacgtcagcgtctgttttatcacatccagcgttaccggcttgctcaggcagctgtccataccggactccagacaccgctgcttctcttcagccaacgcattagcagttactccgattaccggcaacgtcagtcccaactgacgaatgcgttgcgtcaagcggtaaccatccatatttggcatgttgacgtcgctaagcacgatatcaatatgattcttgctaagtacattaagcgcatcgacgccatcattcgcggttttacattgatagcccaagcttcccaactgatctgccagcaaacgccggttaatcggatgatcatccacgaccagaatcatcatatcgtcattatcgctgaccgctttgtccgtactcggcagagcgttagcaggatcgtcgctctccatctcgatcaaataaatacgcgccaacaatgccggtagctcatgcggagcagccacactgtgtacccactcccctggcgctttctccagcggaataccaatatggcgacgacagaaggtcactaccgctctgccctgccattttttactcactacctcgtcagtgatcaacacatcttcgggagtcggttcctgcccttcgtatgttgtaacgacgatgccgctgcgctgcaaactggtttccaggaactgacagaggctcgcattgcggaccgccagccagcagcgtttaccactcaacccttccacgccttttttctgcgggtactgagcgccgtacaacggaatacgcacggtaaactggctgcccattcccggttcactatctacgctgatatcgccgtccatcatgctgatcagtttttcacaaatcgccagacccagaccggtcccctggaaattacgctgtacgcccgttccgacctggaagaagggatcaaacaagcgcaccacttctttcgccggtatccccacgccggtatcgcgaacacggatagagagataatcgccatccgcgcgaacatgcaaaactatacagccggtatcggtgaattttatggcgttactcaacaggttggagatgacctgctgtaaacgcatcgggtcgccatttaaggccactggcacatccggttcaataaagcagtacaagcctaactgcttgcgtaccaccagcggtaaatagttggcggtgatgtggttcatcacttcacgcggactaaactcacgcggttcgatcttcaactgttcgctttcaatcttgctgaaatcgagaatatcgctgataattttcaacaacaggctggaagagttgttcattgccgtcaccagccgatcgacgcctttcggtaactctttggtttgcaacagatccaggttaccgataatgccatacagcggcgttcgcagctcatgactgacggtggcaaggaacatgcttttactctggctcgcctgttccgctgcttgtgccatctcctgcaagctctcttccatcttcacgcggctagaaacatccaccagcacacaaatggccacgttttcattacgatagcggctatggacgaagctgatttgcagattggtattgttgctggtcaggacatcaacaaaattgacctgctgcccacagataatttgcgtcagtcgttggcggtcctcatgcgtaagcatattgagataggtatgcgccagttcgttacttaaaatattgacgccatcagcggtacgcaaaatgcagatacccactggcgcggaggcgacaatcttgcgattgaactgctcatgttcttccagtcgcagggcgtcgctttccgccggaatgaaaatacgtcgctcgtacatccgtgcgagagtaaacaatgcagctccggcaagcacattcagcaaaattgcgttaaggatcaacatgcgaatgcgttccagcaccttatcaaccggcacgctatacacgatgcttaggctactgggtggcagatttttcttcagcaccagctcccggaacccttccgtatagccaaaccaggagcgttcctgcatccagcgaggatcgcccttaattttactttctggtccggtaaggctaatcagggtatgaccattttcatcaagaatggtaacccccatcggcaacgtacccggtaagaaaaagttctccatccggatggtctgctcgacacccaaaagcgcctgcaaccggttcgccagataaactggcgtcaacgcgtaaaaatacccgacgccagggcgcggaccttcgctgatccagtagaggttactgccgctatcatcttgtggtgcatttcgatatttattgatgcgttcatgcaaagctttcaacgcggtatcgcgttccactggcatatcacgcagaccgaaattggccatgcagaggttatcgctgccgattaaaaatacccggtttagatcgtaagccgcagaaaaattatcgcgccagtagcgcataaaccacgccaaactctccagagaacctcgccaggtgttactcattgcggaacaatcggagtcggcaaacagcggttcaaacgcaggcacatccgcctgcgtttctcgtccacgcggggaaagcacaccgttttctgcgcttaagcgattttcggcgatgtacttcagctctttcatcacatcagaggtgcgttgaataaagcgctgagcctgatcggaactcagattaaattcctgacgaatttcgctttctcgctgatgtaacgcattaacgatgtaaaaaacggaactaaaagcaatcaacagccagagcactaacgccaatgctctgaacatgtagcggctggctttcagggttgtacgaaaagaagcaaggtatttcaaaggggcgaagctccgcctcaggtgaccgatggagtgtggttaaggtagcggtaaaagcgtgttaccgcaatgttctctcttctctggaatatgatacaccgccgagaaatcatcaccttaacctctgataatcgtcatataccggacaagactagtggatttcagcatgcattatatgaagtggatttatccacgccgcttacgcaatcaaatgatcctgatggcaatcctgatggtcattgtcccaacgcttactattggttatatcgtagaaacggaaggacgtagtgcagtcttatctgaaaaagagaaaaaactttctgccgtggtcaacctgcttaatcaggcactaggcgatcgctatgatctctacatcgacttaccacgtgaggagcgtatccgcgcattaaatgcagaacttgcccccattaccgaaaatatcactcacgccttccctggcatcggtgctggttattacaacaaaatgctggatgcgataatcacctacgcgcctagtgcgctatatcagaataatgtcggcgttaccattgccgcagatcaccctggtcgcgaagtgatgcgtacaaatacccctttagtttatagtggcaggcaggtgcgcggcgatattttgaatagtatgctccccattgagcgtaatggtgaaatcctcggctatatctgggccaatgaattaaccgaagatattcgccgccaggcctggaaaatggatgtgaggattatcattgtgctcaccgctggtttgctgataagcctgctgttgattgtccttttctcccgtcgcctgagcgccaatattgatatcatcaccgatggcctcagcactctggcacaaaatattcccactcgattaccacaattgcccggtgaaatggggcaaatcagtcagagtgttaataacctcgcccaggcactgcgtgaaacgcggacacttaacgatctgattattgaaaacgctgccgatggcgtcattgccattgaccgccagggtgatgtaaccaccatgaacccagcagcagaagttatcactggctatcaacgccatgaactggtagggcagccttactccatgttgttcgacaatactcagttctacagtccagtactggatacgctggaacatggcaccgaacatgtggcgctggagatcagttttccaggtcgtgaccgcaccattgaactcagtgtcactaccagtcgtattcataacacgcacggtgaaatgataggtgctttggtgattttctctgatttaactgcccgcaaagaaacccagcgccgcatggcgcaagcagaacgcctcgccacactgggtgagctgatggctggcgtcgcgcatgaagtacgtaatccgttaacggctattcgtggttatgtacagatcttgcgccaacaaaccagtgacccaatacatcaggaatatctgtccgtagtactcaaagaaatcgatagtattaacaaagttattcagcaattgctcgaatttagtcgtccacgccacagtcaatggcaacaagtcagcctcaatgcattggttgaagaaactctggtactggtacaaaccgccggcgtacaagcgcgggtcgacttcataagcgaactggataatgaattaagcccgattaacgccgatcgtgaactgctcaaacaggtactactgaatatcctgatcaatgccgtccaggctatcagcgcacgagggaaaattcgcattcaaacctggcaatacagcgacagtcaacaggccattagcatagaggacaacggctgtggcattgatctcagcctgcaaaaaaagatcttcgatccctttttcaccaccaaagccagtggaaccgggcttggtctggcgttaagtcaacgcatcattaatgcccatcagggtgatattcgcgtcgccagtttgccgggctacggcgcaaccttcacgcttattttaccgatcaacccgcagggaaatcagactgtatgactgctattaatcgcatccttattgtggatgatgaagataatgttcgccgtatgctgagcaccgcttttgcactacaaggattcgaaacacattgtgcgaacaacggacgcacagcattacacctgtttgccgatattcaccctgatgtggtgttgatggatatccgcatgccagagatggacggcatcaaggcactaaaggagatgcgcagccatgagacccggacacccgttattctgatgacggcctatgcggaagtggaaaccgccgtcgaagcgctacgctgcggagccttcgactatgttattaaaccgtttgatctcgatgagttgaatttaatcgttcagcgcgctttacaactccagagtatgaaaaaagagatccgtcatctgcaccaggcactgagcaccagctggcaatgggggcacattctcaccaacagcccggcgatgatggacatctgcaaagacaccgccaaaattgccctttctcaggccagcgtcttgattagcggtgaaagcggcaccgggaaagagttgattgccagagcgattcactacaatagccggcgggcaaaggggccgttcattaaagtcaactgcgcggcgctgccggaaagcttgctcgaaagtgaactgtttggtcatgaaaaaggtgcatttactggtgcacaaaccttgcgtcagggattatttgaacgagccaacgaaggtactctgctcctcgacgaaattggcgaaatgccgctggtactacaagccaaattactacgcattctacaggaacgggaatttgaacggattggcggccatcagaccataaaagttgatatccgcatcattgctgccaccaaccgcgacttgcaggcaatggtaaaagaaggcaccttccgtgaagatctcttttatcgccttaacgttattcatttaatactgccgcctctgcgcgatcgccgggaagatatttccctgttagctaatcactttttgcaaaaattcagtagtgagaatcagcgcgatattatcgacatcgatccgatggcaatgagtctgcttaccgcctggagttggccgggaaatattcgagagctttccaacgttattgaacgcgccgtcgtgatgaatagtggcccgatcattttttctgaggatcttccgccacagattcgtcagccagtctgtaatgctggcgaggtaaaaacagcccctgtcggtgagcgtaatttaaaagaggaaattaaacgcgtcgaaaaacgcatcattatggaagtgctggaacaacaagaaggaaaccgaacccgcactgctttaatgctgggcatcagtcgccgtgcattgatgtataaactccaggaatacggtatcgatccggcggatgtataacaccaaaacttgctatgcagaaatttgcacagtgcgcaattttctgcatagccgctcattctccttataaatccccatccaatttatcccttcatattcaattagttaaataactaaatccaataatctcattctggcactccccttgctattgcctgactgtacccacaacggtgtatgcaagagggataaaaaatgaaaacaaaattgatgacattacaagacgccaccggcttctttcgtgacggcatgaccatcatggtgggcggatttatggggattggcactccatcccgcctggttgaagcattactggaatctggtgttcgcgacctgacattgatagccaatgataccgcgtttgttgataccggcatcggtccgctcatcgtcaatggtcgagtccgcaaagtgattgctagtcatatcggcaccaacccggaaacaggtcggcgcatgatatctggtgagatggacgtcgttctggtgccgcaaggtacgctaatcgagcaaattcgctgtggtggagctggacttggtggttttctcaccccaacgggtgtcggcaccgtcgtagaggaaggcaaacagacactgacactcgacggtaaaacctggctgctcgaacgcccactgcgcgccgacctggcgctaattcgcgctcatcgttgcgacacacttggcaacctgacctatcaacttagcgcccgcaactttaaccccctgatagcccttgcggctgatatcacgctggtagagccagatgaactggtcgaaaccggcgagctgcaacctgaccatattgtcacccctggtgccgttatcgaccacatcatcgttagtcaggagagcaaataatggatgcgaaacaacgtattgcgcgccgtgtggcgcaagagcttcgtgatggtgacatcgttaacttagggatcggtttacccacaatggtcgccaattatttaccggagggtattcatatcactctgcaaagcgaaaacggcttcctcggtttaggcccggtcacgacagcgcatccagatctggtgaacgctggcgggcaaccgtgcggtgttttacccggtgcagccatgtttgatagcgccatgagttttgcgctaatccgtggcggtcatattgatgcctgcgtgctcggcggtttgcaagtagacgaagaagcaaacctcgcgaactgggtagtgcctgggaaaatggtgcccggtatgggtggcgcgatggatctggtgaccgggagccgcaaagtgatcatcgccatggaacattgcgccaaagatggtagtgcaaaaattttgcgccgctgcaccatgccactcactgcgcaacatgcggtgcatatgctggttactgaactggctgtctttcgttttattgacggcaaaatgtggctcaccgaaattgccgacgggtgtgatttagccaccgtgcgtgccaaaacagaagctcggtttgaagtcgccgccgatctgaatacgcaacggggtgatttatgattggtcgcataagccgttttatgacgcgttttgtcagccggtggcttcccgatccactgatctttgccatgttgctgacattgctaacattcgtgatcgcgctttggttaacaccacaaacgccgatcagcatggtgaaaatgtggggtgacggtttctggaacttgctggcgtttggtatgcagatggcgcttatcatcgttaccggtcatgcccttgccagctctgctccggtgaaaagtttgctgcgtactgccgcctccgccgcaaagacgcccgtacagggcgtcatgctggtcactttcttcggtagtgtcgcttgtgtcatcaactggggatttggtttggttgtcggcgcaatgtttgcccgtgaagtcgcccggcgagtccccggttctgattatccgttgctcattgcctgcgcctacattggttttctcacctggggtggcggcttctctggaagtatgcctctgttggctgcaacaccgggcaacccggttgagcatatcgccgggctgatcccggtgggcgatactctgttcagtggttttaacattttcatcactgtggcgttgattgtggtgatgccatttatcacccgcatgatgatgccaaaaccgtctgacgtggtgagtatcgatccaaaactactcatggaagaggctgattttcaaaagcagctaccgaaagatgccccaccatccgagcgactggaagaaagccgcattctgacgttgatcatcggcgcactcggtatcgcttaccttgcgatgtacttcagcgaacatggcttcaacatcaccatcaataccgtcaacctgatgtttatgattgcgggtctgctgctacataaaacgccaatggcttatatgcgtgctatcagcgcggcagcacgcagtactgccggtattctggtgcaattccccttctacgctgggatccaactgatgatggagcattccggtctgggcggactcattaccgaattcttcatcaatgttgcgaacaaagacaccttcccggtaatgaccttttttagttctgcactgattaacttcgccgttccgtctggcggcggtcactgggttattcagggacctttcgtgatacccgcagcccaggcgctgggcgctgatctcggtaaaagcgtaatggcgatcgcctacggcgagcaatggatgaacatggcacaaccattctgggcgctgccagcactggcaatcgccggactcggtgtccgcgacatcatgggctactgcatcactgccctgctcttctccggtgtcattttcgtcattggtttaacgctgttctgacggcacccctacaaacagaaggaatataaaatgaaaaattgtgtcatcgtcagtgcggtacgtactgctatcggtagttttaacggtagtctcgcttccaccagcgccatcgacctgggggcgacagtaattaaagccgccattgaacgtgcaaaaatcgatagtcaacacgttgatgaagtgattatgggtaacgtgttacaagccgggctggggcaaaatccggcgcgtcaggcactgttaaaaagcgggctggcagaaacggtgtgcggattcacggtcaataaagtatgtggtagcggtcttaaaagtgtggcgcttgccgcccaggccattcaggcaggtcaggcgcagagcattgtggcggggggtatggaaaatatgagtttagccccctacttactcgatgcaaaagcacgctctggttatcgtcttggagacggacaggtttatgacgtaatcctgcgcgatggcctgatgtgcgccacccatggttatcatatggggattaccgccgaaaacgtggctaaagagtacggaattacccgtgaaatgcaggatgaactggcgctacatagtcagcgtaaagcggcagccgcaattgagtccggtgcttttacagccgaaatcgtcccggtaaatgttgtcactcgaaagaaaaccttcgtcttcagtcaagacgaattcccgaaagcgaatagtacggctgaagcgttaggtgcattgcgcccggccttcgataaagcaggaacagtcaccgctgggaacgcgtctggtattaacgacggtgctgccgctctggtgattatggaagaatctgcggcgctggcagcaggccttacccccctggctcgcattaaaagttatgccagcggtggcgtgccccccgcattgatgggtatggggccagtacctgccacgcaaaaagcgttacaactggcggggctgcaactggcggatattgatctcattgaggctaatgaagcatttgctgcacagttccttgccgttgggaaaaacctgggctttgattctgagaaagtgaatgtcaacggcggggccatcgcgctcgggcatcctatcggtgccagtggtgctcgtattctggtcacactattacatgccatgcaggcacgcgataaaacgctggggctggcaacactgtgcattggcggcggtcagggaattgcgatggtgattgaacggttgaattaatcaataaaaacacccgatagcgaaagttatcgggtgttttcttgaacatcgacggcgaaggtaaccccattaatcaccagtcaaaacttttcaccagcgtcagctcgccagcattacgcatcggtacaataaatgtttcctgtttctcattgacgcttccttcatcggtgatcagcgtcagttgggcggtggttaattccgtttcgctgcgcccaccatagtagttgatatacacctgatagcgcccgtgaattggcgcgggcatggcgaaaatctcgggtccgtaccccgtcgtgacatccatatccagtgcaccactgtttttcagcacggtgttaccgtaccaggcgtgttcgccatcgggcgtaacaacgtgaaggtcgaggtcggtattgtccgtatcccagctgagaaccagccgtaaacgtgcacgaatcgttcctgtacccggcgtactgtaaaactgcattttttgtcggctttgcccatccgggctgatgacctgcacgctgttgctgccttcagtgaaaatataagggcgtgcaaaactaccatcggattcaattctctgcggcatactggcaccgttgaccaccagccggccctgctgaactttacccgccgcagcataattctttattttgccgcggatctgcgcactgatattttgatcatctgccatgttgacggagctcgccgggtaattgatgctttgactaaaactggcatcttcgccctctgccggatgccagccactgagcggtgcatcaatctcgacttcctgcacaccttcactgtgagcgacagggctaagcgccaccagtaacaacggaagaaaaatctttcgcatagcattagtccattaataattgtcgggtcagcgtttcgatatagttctcatcaagcccggtgggataaccatcaaaggccaggtgcagatactcatgggttaaatccagccgatcctgaagcgtaaagaagttacgaataaacagccgtttctgctgccgatcggtataggggaaaccactgactaaacggcaaaccgcaaacacgtctggttcgttgtaccccgtctcagcttgtaatatacgccgccactgcggcatttttttcgccagccaggctttcgctttgggtaataactggcaggtactgcgtggcgctccccagcggctaagactgttgtcgggataagcaaacgcgagtatctgatcgtaacgctctccctgccccgcctgggccgtggcttgccgccaggaaagtgtcccttcggtagcgcgactgccatgataatgaaccggatcgcctgcatagatgagatcctgcgtccaggcggtcatcgttcgcgcccccgtggtcgctgggctagcagaaacacgctgcgtggcgctgctgtcggggatggtcaggcaatcgccttcccgattggcgttttgctgtaaaaaagtgcgaatcgccacggtcatggctttcgctgcctcagggggcgtacttttcgcctcgcgatccagaactctggcaacgtactcttcacgatcgagatggctctgcaatttcagtttgcccttttcgctcagtaaggtcgtctcaccgtggctgacaaacgtaatgtggttaccattagtaaacgtcacacgatagcgcccattaagtacgccgggatttactgccgtcgtactcttttccgctgtgattttcttcagcggatagcgggcaaacagctccacctctacacattgcccactggcaacctgcgtcggcactggcaaaacccgattaagcaccgtcgcataacgggttagtaccgttttgctggtgccactgccagtaacccacagcggtgtaccatcggttaaccagccagcaaaaccaccctgacggatttcctgtttatcatcggcaaaccagctccaggttttcacccgtacccgactaccgagcatggatgcgacaccgattttcgcctcgtccagcaccacatccagtaagacttcctgagctttgttttgcgcgggtaacgtcgctaaactatcaagcaggcttttaaccgttacgctggtttctggcttcagcgtagtcagagacgctaaccacgcaggtgcctgacgctgttgccagtattgcccccacacatctgcgccaatatgcaaccgctgcggcgcaaaatagagcccacaggaacgtaccagcgcggtatcgcgcgttatgctctccccagcctgacaacaataaacctcttccggggagtttccgcgacactggtagggctgctccggttgatgggtatcctccagccaggcgtaaacatacagtttccacaaactccctaacggcgtggtgaggctgtcaggtaatgcactgactttggtcacgccactactgctcagctgatacagttgatcgtgctgcgcaccgcgcagcaccagttgtaacggcgtctcctccgcaagtgttggcagagtaaccaacgccaatagccagacgattcagcgccagttcacttatttcacctgcatcccggtccattcactccctgccgcaacactttgctgcgcaggtgcataggaacgcacataacgagcaggaggcagaacgaattgccctttttgcgagaagcgcagcaaatggcggaaagtgaccgttcccgtcagttctttcaccggcaccatataggccagttcgcccatttcatttcgcgctttttccagcaattgcccctgctgtttcgcggcgttgggtttattgaccgaaatgccccatgttgtgcgctcaacgtcggctcccggtggcagcggtacttccacctgaccgtagcgcagaactgcatcctgctcgctggtaagcgtgatttcatcgagatacagcgcatcgctgtcaatctcattgctggtcaccggttgcagaataaagctcatctcttcttcaccagggataagccgatacaactggcgttcaacggtcaccggaatgttactttgttgagccatttttgccggctcacgtcagcggacctgcacattttgcggcgataattcgtcaccaaaagagagaatgtccggcacgccctgaccaacccaacgccagtcttcgccccctccagttaacttatgtttagcccatgcgcccgcaggcgcaggcaaaacaactggaggcattgtcgccatatatttcgccagccagttcatggccagcgcgcgctcaatagtggattgctcagcggtcaaaccacttaaaatagcggccgtctgggtagcgtcgccaccgctattaagcagcacaaccgtgtgcgccagcggctgattgctgtttgccgctttatcccacgcatattgctgaacctgtggcatcaccgtggacttcaactgcgcttttttcagcaacgtcatggttaagacgtttgccaccgcatctgccagtggagactccggtgtatcgaggatcaggctatcattgatatcgcgggtgtcttcctcagagaaatcttcagttttagttccgcgccgggcgatagcttcatccaaccctttcaacaacgttttgcacggcaaattcatctcctgcgcccatgccagcaccagcgcccgatgcaataacggcatgttatctgcctgctccgcgtagctgtcgagcatatgctgccagtattccggttgttgcgttacgccgatcgcctggctggcctgccagtcggcgtaccatgcccatgccgtaaggaaggcgtcaccattgccatcttcaccccaccaggtaaagcgcgctccgggccccgccagttgcatcagccgcagacggttatcctgaatcatctgacgaatgtcgttagcggcggcactttgatgatcggcaagcgaacgccaggcgagactgagcgggatcagacggctaccggtgttgattacgccaccccacggttcatcgactaacgcatcaagattgttgcggaaaatctcctgcggcgtttcactactttgtagccggatattgctcgcctgctcgggcaacatcagcgcgttatcgccaccaccgagcatgacatttttctgctgttcaacgggccagctgttatccacaaaagacagttttgtgctaatgctgtcctgcacttgcccattttgttgcagttctgcacttaacaagccagattgctgaatattctgcgtcagcgaaatataattcgcccctttgtgcagcgtcagcgtctggcgcatctcagcgcctgcaaatttagtcaccagcgccaccggttcgttatcctgctgactgaagataaatagtcctgccgccggtttgtcgcccacgcgatacaccgttggcatactccacttcatgtagagatttttttccgaacgcagataagcacgcccctgcccgaccagcccgtcgccgttcatcccacgcgcggtgatacgccagcgggttaacgaatcaggcatcaggaacgtgaaatacgctttgccttgtttatcggttgtgagtgacggcatccatgccgcggtatccacctcttcacgccgtggacgttcaagcatttttactcgccgctcgctgcggttagttgcgccaggcgcaaccggctcgctggagagcgcctggtcgtagctgataaacgacagactggagctggtacgcacattgttacgccccagcggatagaaaaatttgccgatattcggcgcgatttctggttgcagcgcgtagatcatttcatcgaccacgcctaccgttagctgcgcagaaacaggtttacctttcagcgacgaggttaattcgacattgaccagttcaccaggctggtaatgggttttgtccgttttcacccggatatccagctggggaacggcaactttgatcccggcgttctgaaaactgtactgaccgttacgggtatacagcaccgaaaaagtgatgttaggcgcaaaggaattgctcactggaacccgggcttcatactgggtatcgtttaaacgttgtagcgttagccagtttgccggatgcgaaagcagcgactgctgttccacgcgatcgcgttccagcgtcaataatgcttcatcaattggctccggaaaggtaatcagcatcttcgcggtttcgcctggctggtacagcgttttatccgccacgatatctaccgtaccagtatgcgccgtgctgcccttaccgctgacggcatgacttaacccagcgagaattaagccgtctttatcgcgtaatgtcagattgtagttgccaggtttagcgaaattgacggtaaaggatttgccgcctgacggtagctctccgctatggctcgtgcggtcttcgagacgcaaccattcatacgtaacaggaacctgttttgaagattccagcgcggcataacggaacacaaccgactcgccgctattactgtattgtgcggcagtacttaatgagtaatgcgccagaccgcgttcaatgaggatctctttggtggtggtgacgcgatacgccgcgccgtcactggcggagacggttaacaaatagcggctcggtttatcggcggcggggagatttaacgccacatgaccgctggcgtcggacaccgtttcgctgccttccagcgacacggggaaacgtccggcataacgcaaatcgttaccgaccattgataattgctgagcgcgcaaacttaactgcacgcgggcattttttaccggctcgccatccgggtagagcagttgcagtttgccgctgaccgcttcgccagttttgaactcttttttggcgagagctaaaccaatctcgaaatgtggcttgatgtagtttgccacgcgaaaactgctgctatagacctgattgcggtaagcaagacgtaactcataacctccggctacggcattttctggcaggcggaaacttccctgcccgccattgcgcgcatccagcgtgacattgacggtttgcaacagactgccgttggcgtccagcaccgaaagcttcgccggggcgctgacgatgggggatgaatgcaacggatcgtggaactcgcggccgatcactttaacatcgacacgatcgcctgcgcgatatagcgggcgatcggtaaaaatatacaagcgggtgttgtagatttcgctttcgtagaagaagttctcggagacaaaaacgccgccttcagcatccttacccagaatgtatgaacgttctggcgatatatgttgtaactgcaaggtaccgctgtcatcggtcacaccgcgggtcatcacgccaagaccgtcagtccacaagatctctgagccgggcttcgcttcaccctgttttttacccgcggtccacaccagaagctctttgcctgacactttgctaagcgccacggtatcggaaacaaacaccaccgtcgtcgcccgatacccaccaaccatcgcctcgacgaggtacagtcccggctcttgttggccgagaggaatataaatgttacccggctgcggcgagatgaaattgctggatgcgccttccagttttaccccttgctgcggctcgaacggtttagcctgccatagtggataacggaactgtttcaccaggggatattttttcagcggggaaaactggttgttctgtacataacgggaaggtttaataatggcattgccgagctgtaattcgggtaacgcctgagtcacattctgccgtgactgagaagagaaagtacgctgcatcacgcggcgagatttgccgtaccagttatcccacagccaggttagcgtattgttcagcccgtcgcccagatattgcggttgcaccacaatgcgatgcaggtttttctgctggcgcaaaaatgccatcgggtcaggaatacgatacaggcgaacgtccacgccgccgtactcttccatctgatagcgccgataatcacgccccggcgcttccagtcgcactttcgcctcttcactgctgctaaaactgctgtcagcaagcaaaaagaatgttcccccggcaggcggcgcatagttgctggaaggaagcgaatcatcagcattagcaagccctgttcccacaagagacagggacaagcacgctgttatcgcgccagaaaatttaaacgataaatgccaatgaaattgggattggaatcgttgggtatccatcgggtgtccttccatgtcataagttgttgcagactgactgcgcgcattccgttgtcagttttcgtggcgcttccggtgtggtagatgacgtaacgccccatccagaccattaagtgctgggcatcgccctgatcgaaaaaaatcatatcgccaggcagcgcctggtttatgtcctggccaataaactggctgttgtactgaatcaaattaatcgcggtcacataggggccggttttcccgttcccctgattccagttttgcgccagttgacgctgttcaggtgttagcgtcatctctggcggcaaatactggctagataaaccgttactttttagccatttactgtcgtgaactttcagcgtctcgttcgccgcaaatcgcaccaggcccgcacaatcctgctgataccagcgtggacttggcccctggcggagctgttcttgtgcaatgcgtacaaaccaggcgcgaaacagcccggattgttcgacattcagcatttcgctatgggcaacaacacaacacagccagcaaatcagcgccagcagcccgtgcctcatagcggctgccaggttatgggtagccactgccaggcggcaccgggttccatctgggccagcttcatgacataacgcggttgttgagataaagcgtccagcttcggcattaataaagtttgtgcggcgttataaaaaaccggttcgagattcttcggcagactggtcaacgtttcgttacgcagcagtttcgctattccttgtggattgatatagagcggaacgatgccatcagtgggtattacatccaccattgccgggcgggttttattcagtgtttgcagcgcgttattaaccagcgtgtcatcgagggagaaaagcagcgttttgttttgcatcgccaggctcacacggaaaaaataatcgctcattaattgatcgggttgcgccgcctgcgctttcggatactggccgtatcgggaactcacttcgcgacgccagatttgcgcttcgccctgctgagtctggcttaccggcaaaacaccttctggcgctttgctttcgtgcgcaccaatattttgcgtaaacagtttccctggcaattgcgcctgttcggcagtgccatcaaactgaccgacaaacagcggggtttgcaatttactgtcttcataccagcacagccccgcggcaccgtctaacgccccattcagcttgtcgttttcctggctgatgtggctaagcatctcttcggcaataccgtgactatacggcaccgccacacagaagctggctccggcaggcatactgttccataccggcgtaaaatcgaaactggcatctacgctggcggattcatcatttaacgccacaaaactgtgccagccgtcgttacccatttcgaagcgtacgccagcaaaagaaggcattaaccgctggtagccaaaccccagccacctggcgctgactacgatgcgctggcgtactggcgttttttcggcagtacgctcttccaggccaaagcttgcttgccagcgttttttgccgctcaacaaatcacctgcgatcgccgtggcttcggtatcctgctgatcatctttaaacaacatatccgtgctggaaaacaccagcatcttgtcctgataagtcgcgaacatcagggcgttattgccgttatagcgcaactgataaacaggaacagtttcactatttatcttgatgctactgatttccgttttgcttaactggctgtcgctggtagcggcaaacaacaatggctccagcagtttgcttaaaccactgcgctggatcagcaccatataatgactaagatggccttgtttatcgtgccacagcgctgcctgcgcgggctgatctaagagactgctaaagagcttatctttcagcgtgagatcgtgttcatagacaatacgacgaatgctgccttcaatgcccagacgatcggcatgattctgataatagaaaacgaaatcttcgctcagaacatcgtggagaaacggaatggtgaggagatctttgggaagctggctcagagagtcgctgtcgagaaagaggtccggctcattgagatcgatttgcagattgttgtgcaccaccagcgggctcaacgttttttctggcccactgccagcatattgcaacgcccagacgccagcggaaagcagtgctattgcgccaaaacctacaagaccatagaaccgccagcctttcgccttttttcaccactcattgccacattccttgtgtatagccagccattttttacgggcacagccaaactttaccgtgccctaatacgacaaaagcccagactttgcagcctggacttttcaattcaaacaagggagatagctcccttttggcatgaagaagtaaaattattcttcttctggctcgtcgtcaacgtccacttccggagcgatttcatcgtccccttccgcggcactgccgtcgatggtatccagatcttcctcgtcaaccggttcagcaacacgttgcagacccactacgttttcatcttccgcagtacggatgaggatcacgccctgggtgttacggcccacgatgctgatttcgctaacgcgagtacgtaccagcgtaccggcatcggtgatcatcatgatctggtcgcagtcatctacctgtaccgcgccaacaactaaaccgttacgttcggtaaccttgatggagataacccctttcgtcgcacggctcttggttgggtattccgccactgcggtacgtttaccgtaaccgttttgcgttgcggtgaggattgcgccatcgccacgaggcacgatcagagagacgactttatcgccttcacctaagcgaataccgcgaacaccggtggtgttgcagcccatcgcacggacagaagactctttaaagcgcaccactttaccttcagcggagaacagcattacttcgtcttcgccgctggtcaggtcaacgccgatcagctcatcgccgtcaaccagtttgatcgccactttaccggcggtacgcagacggttgaactcggtgaggacagttttcttcacggtaccgttagcggtcgccatgaagactttcacgccttcttcaaactcggtcactggcaggatcgcagtgatacgttcgtcctgctccagcggcagcaggttgacgatcggacgaccgcgcgcgccacgagtggcttccggcaactgataaactttcatgctatagacgcgaccacggctggagaagcacagaatatggtcgtgagtgttcgccaccagcagtcggtcgataaagtcttcttctttaatacgtgcggcagatttacctttcccgccacgacgctgcgcttcgtattcagaaagcggctgatacttaacgtagccctggtgagagagcgtcacgaccacatcttcctgggtgatcagatcttccaggttgatgtctgcgctgttggcggtgatttcagtacgacgtttgtcaccgaactgttcacgaaccagctccagctcttcacggatcacttccatcagacgatcggcgctaccaagaatacgcaacagttccgcgatctgatccagcagctctttgtattcgtcgagcagtttttcgtgctcaagaccggtcagtttctgcaaacgcagatccagaatcgcctgagcttgctgttcggtcaggtagtacagaccatcacgcacgccgaactctggctccagccattccggacgcgcagcatcgtcgccagcacgttcgagcatcgcggcaacgttgcccagctgccacggattagcaaccagcgcagttttcgcttctgcaggcgtcggcgcatgacggatcagttcgatgatcgggtcgatgttcgccagcgccacggctaatgcttcaaggatatgagcacgatcgcgagctttacgcagttcgaaaatagtacgacgggtcaccacttcacggcggtgacgaacaaacgccgcgatgatgtctttcaggttcatgatcttcggctgaccatggtgcaatgccaccatgttgataccgaaagaaacctgcaactgggtctgggagtagaggttgttgagcacaacttcaccgaccgcatcgcgtttcacttcaatcacgatgcgcataccgtctttgtcagactcgtcacgcagcgcgctgatgccttccacgcgtttttcttttaccagttccgcaatcttctcgatcaggcgcgctttgtttacctgatacggaatttcgtggacgataatggtttcacgaccggttttggcgtcaacttccacttctgcgcgagcgcggatatacaccttgccgcgaccggtacggtaagcttcttcaataccgcgacgaccgttaatgattgccgccgtcgggaagtccggccccgggatgtgttccatcagcccttcaatgctgatgtcttcatcatcaatatacgccagacaaccgttgatgacttccgtcaggttgtgcggcgggatgttggttgccatacctacggcgataccggaagaaccgttcaccagcaggttaggaattttggttggcatgacgtccggaattttttccgtgccgtcatagttatcaacgaaatcgaccgtctctttttcgagatcggccatcagttcatgggcaattttcgccagacggatttccgtataacgcattgccgccgcagagtcgccgtcgatagaaccgaagttaccctgaccgtctaccagcatataacgcaggctgaatggctgcgccatgcggacgatcgtgtcatagaccgcgctgtcaccatggggatggtatttaccgattacgtcaccaacgacacgggcagattttttataggctttgttccagtcattgcctagtacgttcatggcgtaaagtacgcgacggtgtaccggcttcaggccatctcggacatctggcagcgcacggccaacaatgacgctcatcgcataatccagataggagctcttcagctcttcctcaatgttgaccggtgtaatttctctcgcaaggtcgctcatctaaccgctatccctctactgtatcccggattcaaaggtcgcaaattataacacagccgcgcagtttgaggtaaacctatacgctttattcacatccaatgcctgatatactcgtttgtcttgccaattacggagtagaagtgccaatgaatgccgaaaaaagcccggtaaaccataacgtagaccacgaagagatcgctaaatttgaagccgtcgcctcccgctggtgggatctggaaggtgagttcaaaccgctgcaccgcattaacccgctgcgtctgggctatattgccgagcgtgctggcggtttatttggcaaaaaggtgctcgatgtcggttgtggcggcggcattctggccgagagtatggcgcgcgaaggcgcgacggtgaccggtctggatatgggctttgagccattgcaggtggcaaaactgcacgcactggaaagcggcattcaggtggattacgtgcaggaaaccgtggaagagcacgcggcaaaacatgccgggcagtatgatgtggtgacctgcatggagatgctggagcacgtccccgatccgcagagtgtggtcagagcctgtgcgcaactggtgaaaccaggcggcgatgtctttttcagcacacttaaccgcaacggcaagagttggctgatggcggtggttggtgcggaatatattttgcgcatggtgcccaaaggcacgcatgatgtgaagaagtttattaaaccggcagaattgctgggctgggtggatcagaccagtttaaaagagcggcatatcactgggctgcattacaacccgatcactaatacttttaaactcggccccggcgtggatgtgaactatatgctgcacacgcagaataagtgaggttgatgtttggccgcgccaatgcctgatgcgacgcttgccgcgtcttatcaggcctacaaatgctccccgtaggccggataaggcgtttacgccgcatccggcaaccgtgccgactagacagtgattaccatttcaccgtcatgctcaaaaaccctgccgtctgggcaaaatcatcactccctttctgccacgccacgctgccgcgcagggacactcgctgactgatattgcccgtgactcccacttttatttcaccccgttgcttcaccgcatcgtcactgatagtgctgccatcctcttcaatttccgtgctatggggatcgtgataataattcagatctaatgttggtatgacatgaacagcggtacgccattcgctgtgtaaacccagccgcgtctgaatatcatcaccctggctttgactcacgcgcgcacggttagcggcggtaaaatcatcctgctgcacgccctgataaatcacctgcgcctgcggttcaatcaccacaccacgccccggtaaccactgataccccgcctccaggctggcgataatcccgctgctgtggtaatgatctgtgccatcttcttgttcggaaacatcattgctaaaccacgcgtattgcagccagctatccagccaggccccttgcttctgattaccgtgctgaaaccagctacttgtcagcccaacggcataaccgtggttctggttatcggcgcgagttccggtcatattgctgcggctgtcgccctggttatcgctgtagccaccaacaatcccaagcatccactcgccatccgtgccccagcgcccgctaaacagatcgccgctaagttgcaccgtagaagtgtcttcatgttgagccagttgccccgctgctgtgtaatgataatctccgccgataacacgtaaattcagcgtctgaccatcgccacctgcgtgatcgcgtcgctccatcataaacgcctgatttgccgcccgcaggttattaagataaccgccaactttggcattcaacaccggctggtaagcaggcgtaggttccgggtcgggtgttggatcaggatccggcgtgggatcaggatcgggagtcgggtctggatcaggtgggcttggcggcgttacttcttggcttcgcagataccagtcgttgttatcttccaccagcgtgtagtcatacgctcccatattgacgtagccgctgcctgccagactgaactgcgcattgttttgaaactgcgtgggatcagctgcgaaatcaaccactttaatgcctgtgcttgtcggctcaccaatccctgtaatggagttaaccaccacagttgtgttgccagcagtattaccgttcatcaccaattgatcgcttacgctgtcatcgccgtttaattcgctatcgagcagtagcgtaccgccgccggtataatcaccgtttaccgtcagcgtatcgccagcgacgccattttgcaggctaaccgcaccggacgtattggtcagattgccattaaccgtcacgttggaaagataagtcaggctgtcagtttcaaggttggtattaagctcacctgtcaacgtcacaccatcggtggcattcaccagcgtcccatcgccgttaaatagactggcattaagggcgacggaagtatcctgcccggtcaggcgcaaaaccgtaccatcgctgatgtcgatagtgccgctggaaatagcatcaatactctgaatatcctgatccgcgccagtaacgaacgttgccccatcaccaacccacagactgctagcataaggaaggatatcagcaacatcacctttcagggtgccttcttcgacacgtaccgcgctctgcgttgtaccgctggcggtcagctccagtgtaccagcccccgttttagtcaatgtgctaccctcatcctgatgctgcccgctgctgtcagccatcagtgcgccccactgcgtgtctacccccgcatcaactgccacttcaccgtcggcgcgcatttcaatatcacgtccgtggcctgccgcatcactacgcgtgtcaacgtcggaggtaatctccatcacgctttcttgttgcttatcggtaaagataacctggcggttatagtgggtatctccaagctggctgttgtcgctcaccatcagcgtaccggaggcgatttgtgttgtgcccaaataactattattgtttgccagacttacctgcccgtcgctcgcatcgaccaccacgtagacgccatctttcccgtcgccgccgatatgcaaattgtcgccacctgcaagatctaccacatcctgactgccgataaccgttccgctgctgccactgacttcaaggccatcgttgtaacttgtgccgctctgccaggtggagaaatcagagagatcgagcacaccgccgtttaacacgatgctctgcggatcgtcctggagagcggtaagatctgccgcgtcgccttccaggctaagcaccgcaccatcatcaacgactatatcgccggttagcgccatgctctgcgcccctgccagcacgtagctgccgttttgcgcaatggtgagctgaccagcaccttcgatgatgccagcaaaactgccctgattaacagtaacgttgccaccagcatcgatatttaaagtgccattctgaaagcccgtcaatgcgtgcacaaaagtttgttgggtgctgccaacgtttagctcagcctgattctgatactgatcaatactccctatcgtcagaccgtagcagtcttgcggatcgtcctggcaatgcgtatcgccgacattcatcagggagttgctgcggcccagggtaacttcaccgttttcaatctgcatctcaccagtaaagtcattgttatctgcattaagtaccagatcgccggaacctgttttggtgattaacccggtaccagcaatagagtcaacagctccgtcattctctgtattgccaataaccagcgtttttccgtcggcaatatcaaaggtaacttcacttaagccgagatacataaagccacccgccgcagaggaaggaccatctccatagcctgctgcgctattgttctcatcgactaacacgcctccgttctggctgtagctgtcatcaacagaaatatcaataagatagggagccgtcacgctattggtatatatcgccccgccataaccttcggcagtgttatttgtaaaggcagtgttatttactatcgtataaccactaggatgcttgctgtcgctattattatcggtaacatcgattgccccgccatcgccatcactgtaacttgtacttgtatatgcctggttgttatcaaaaataacatcacttaaataaacgtcattattaatggtataaattgcgccacctttgccatcattagcgatgttattgcgaaacatggcgttagtgacacgtaaatcgacggcaccagtatcgttagtaccagaagaatagattgcgccaccatagccgcctgcgacgttaccggaaaaaataacatcagtaagattcagcgtactgttttctttagcaaatatggccccgccgttattatattctcctgtaacggtgttattggcaaacagagtcattccagtttcattttctggtaatagactaaattccgctccttgttgcaaaaatacggccccaccgctggcgttattggtcatatcgctaaaaaccagccattgcccatcagcgatactccagtcctgcgtaatgccactaaggctttgcctgctggcctgacaactcgctttgacatcatatccctggcaactatcagtgaccgccgcgacaccgttagcagagaaaagagatgcaatcatactcgggagtaaagataaatactccttgcgtagaaagataatccgcatattaatctaaccatcattttctataagacggcgtatttaatcgcattatacgatatggaatatctttcttttgtaaattgttcaacccggtgcaatggctattttgttattatttgatgaataatatcagtgcgtcataattcaagttaataaccttcagggatatcagttatatttaaactaaattaaagtcatgaataattttcttataatataaggtaaattaacaaaatggcttagcatttaacaataaccgaatagaaaacaaccatttcgccatcaacaatctcttacattcgcttatatattgaccacaactgatacatcagattatgtgatgactcgtgcttagatcaatttttgcaatcattagcaaaaagattaataagccatctatatcaatttatctaacctattatgccgttcaagaaatcgccgaacagttatttttaacaaatttttctcttcccattgactttcccggacaccttgtctgacctaaggtgcgcgaaagccactttttccttcctgagttatccacaaagttatgcacttgcaagagggtcattttcacactatcttgcagtgaatcccaaacataccccctatatatagtgttctaagcagcttcccgtactacaggtagtctgcatgaaactattgcggaaagaattccaaaaacaggtacgacatacatgaatcagaatctgctggtgacaaagcgcgacggtagcacagagcgcatcaatctcgacaaaatccatcgcgttctggattgggcggcagaaggactgcataacgttagcatttcccaggtcgagctgcgctcccacattcagttttatgacggtatcaagacctctgacatccacgaaaccattatcaaggctgccgcagacctgatctcccgtgatgcgccggattatcagtatctcgccgcgcgcctggcgatcttccacctgcgtaaaaaagcctacggccagtttgagccgcctgcgctgtacgaccacgtggtgaaaatggtcgagatgggcaaatacgataatcatctgctggaagactacacggaagaagagttcaagcagatggacacctttatcgatcacgaccgtgatatgaccttctcttatgctgccgttaagcagctggaaggcaaatatctggtacagaaccgcgtgaccggcgaaatctatgagagcgcccagttcctttatattctagttgccgcgtgcttgttcagcaactacccgcgtgaaacgcgcctgcaatatgtgaagcgtttttacgacgcggtttccacatttaaaattagcctgccgacgccaatcatgtccggcgtgcgtaccccgactcgtcagttcagctcctgcgtactgatcgagtgcggtgacagcctggattccatcaacgccacctccagcgcgattgttaaatacgtttcccagcgtgccgggatcggcatcaacgccgggcgtattcgtgcgctgggtagcccgattcgcggtggtgaagcgttccataccggctgcattccgttctacaaacatttccagacagcggtgaaatcctgctctcagggcggtgtgcgcggcggtgcggcaacgctgttctacccgatgtggcatctggaagtggaaagcctgctggtgttgaaaaacaaccgtggtgtggaaggcaaccgcgtgcgtcatatggactacggggtacaaatcaacaaactgatgtatacccgtctgctgaaaggtgaagatatcaccctgttcagcccgtccgacgtaccggggctgtacgacgcgttcttcgccgatcaggaagagtttgaacgtctgtataccaaatatgagaaagacgacagcatccgcaagcagcgtgtgaaagccgttgagctgttcagcctgatgatgcaggaacgtgcgtctaccggtcgtatctatattcagaacgttgaccactgcaatacccatagcccgtttgatccggccatcgcgccagtgcgtcagtctaacctgtgcctggagatagccctgccgaccaaaccgctgaacgacgtcaacgacgagaacggtgaaatcgcgctgtgtacgctgtctgctttcaacctgggcgcaattaataacctggatgaactggaagagctggcaattctggcggttcgtgcacttgacgcgctgctggattatcaggattacccgatcccggccgccaaacgtggagcgatgggtcgtcgtacgctgggtattggtgtgatcaacttcgcttactacctggcgaagcacggtaaacgctactccgacggcagcgccaacaacctgacgcataaaaccttcgaagccattcagtattacctgctgaaagcctctaatgagctggcgaaagagcaaggcgcgtgcccgtggtttaacgaaaccacttacgcgaaagggatcctgccgatcgatacctataagaaagatctggataccatcgctaatgagccgctgcattacgactgggaagctctgcgtgagagtatcaaaacgcacggtctgcgtaactccacgctttctgctctgatgccgtccgagacttctagccagatctctaacgccactaacggtattgaaccgccgcgcggttacgtcagcatcaaagcgagcaaagacggtattttgcgccaggtggtgccggactacgagcacctgcacgacgcctatgagctgctgtgggaaatgccgggtaacgatggttatctgcaactggtgggtatcatgcagaaatttatcgatcagagcatctctgccaacaccaactacgatccgagtcgcttcccgagtggaaaagtgccgatgcagcagttgctgaaagacctgctcaccgcctacaaattcggggtcaaaacactgtattatcagaacacccgtgacggcgctgaagacgcacaagacgatctggtgccgagtatccaggacgatggctgcgaaagcggcgcatgtaagatctgatattgagatgccggatgcggcgtaaacgccttatccggcctacggctcggtttgtaggcctgataagacgcgccagcgtcgcatcaggctccgggtgccggatgcagcgtgaacgccttatccggcctacggctcggatttgtaggcctgataagacgcgccagcgtcgcatcaggcacaggatgcggcgtaaaatgccttatccggcattaaactcccaacaggacacactcatggcatataccacctttagtcagacgaaaaatgatcagctcaaagaaccgatgttctttggtcagccggtcaacgtggctcgctacgatcagcaaaaatatgacatcttcgaaaagctgatcgaaaagcagctctctttcttctggcgtccggaagaagttgacgtctcccgcgaccgtatagattaccaggcgctgccggagcacgaaaaacacatctttatcagcaacctgaaatatcagacgctgctggattccattcagggtcgtagcccgaacgtggcgctattgccgcttatttctattccggaactggaaacctgggtcgaaacctgggcgttcagtgaaacgattcattcccgttcctatactcatatcattcgtaatatcgttaacgatccgtctgttgtgtttgacgatatcgtcaccaacgagcagatccagaaacgtgcggaagggatctccagctattacgatgagctgatcgaaatgaccagctactggcatctgctgggcgaaggtacccacaccgttaacggtaaaactgtgaccgttagcctgcgcgagctgaagaaaaaactgtatctctgcctgatgagcgttaacgcgctggaagcgattcgtttctacgtcagctttgcttgttccttcgcatttgcagaacgcgaattgatggaaggcaacgccaaaattattcgcctgattgcccgcgacgaagccctgcacctgaccggcacccagcatatgctgaatctgctgcgcagcggcgcggacgatcctgagatggcggaaattgccgaagagtgtaagcaggagtgctatgacctgtttgttcaggcagctcaacaggagaaagactgggcggattatctgttccgcgacggtagcatgattggtctgaataaagacattctctgccagtacgttgaatacatcaccaatatccgtatgcaggcagtcggtttggatctgccgttccagacgcgctccaacccgatcccgtggatcaacacttggctggtgtctgataacgtgcaggttgctccgcaggaagtggaagtcagttcttatctggtcgggcagattgacagcgaagtggacaccgacgatttgagtaacttccagctctgatggcccgcgttaccctgcgcatcactggcacacaactgctgtgccaggatgaacacccttcccttctggcggcgctggaatcccacaatgtggcggttgagtaccagtgtcgcgaaggttactgcggctcctgtcgcacacgcctggttgcaggtcaagttgactggattgccgaaccgttagcctttattcagccgggggaaattttgccctgttgttgccgggcaaaaggcgatattgaaatcgagatgtgaattggttgtagtgccagatacaacgcttatgcgtcttatctggcctacaacgattacatggcgtagtaatacgctttcacctgctcccagtccgctttggggattggctccagatatttttccagctggcggaagtcatgattaatcgctttatcgcgacgcaagcggcgacgacttttctccaggtcaagaaaaccagcttctgcattaccttctgttttcacatagatatggcgaacataacaacagccatgctgacgattaatgctatgcattttcttaaacgccagcgccactgctttcaacatggcttgccgtacttcgtcagaataagggcttactgcatgctgggcataccagtcagcaatgctgatgaaccccgccatatcttcagtcaccagcaacgctcgccattcaccctcaattttcaccgcttcaccaaaaacgatcttcggcacgatgacaccggcccgttccagttctttaattaccgcaacctcacggacaatcgttggtcggccgaacggataacgtacggaatgaaacagatgatgcgtcatgcgctttacatacagctttttgccgttgcgctcgacgcattgcaccccgctcataccattacggcgatagttaggctcttcaacccagtcgccctctgttgcccaccagtgattaaattcgtcgtactttgcactaactgccataccctatcgcctgtcatttttattaacgacaatgactataggtggttacctgaggaaaatcttaatgaaacgtgtcgtattaatgaatttcttttgccactactagcttgacaccgcttttacccttcatttgcagcgcatagattccaccagccactaccactaatagtgcgcccagcagataaaatgtgaatttaatcaggcggatacagcgatgaattttattcgacagggattaggcatcgccttacaaccagagttaacgctgaaaagcattgcaggtgaattgtgttccgttcctctcgaaccaactttctatcgacagattagcttgctggctaaagaaaagccggtagaaggcagtccactgtttttactacaaatgtgcatggaacaattagtggcgattggaaaaatttgatatgagacaggatggcgcatgaacgccatcctgcagtaacattactctttattaagaaattttactgccttatcagggaaatcagtaaacagcccatttacacccgctttgttatacagagcatcatataactgattcacatcaggagtgtattcaggcagtttatcactccgcacggtataaggatgcactaccagtttattctgctgagcatcttgcaccatgccagtgagtttgatattacccggctggcttgtctcctcaatcaacatatggtaatccggaccaataccatctgcatattccgccacctgtttcatggcacccggcttaaacatccagtcgtagttgtaattaacccagcttccatccggctgtttctgctgcgtttcattccagtcggtataggcaatcagctgtaccagattgagctccatgcccattttgggttccagctcattcttaatacgcttcagctcatcagcatcaaaacattgcaaataaactttatcgtctttaccggtgtaaccatatttcttcagcacttccagcgtttttgccgcaatatccttcccttcctgatgatggaaccacggcgctttgatttctggataaataccgatatttttcccggtagagtgatttaacccctgaacaaattcaatctcttcttcaaaggtgtgcacccggaagtcggacttacccattgggaaacgccccggataagtctgcacttttttaccgttttcaatatcgaaaccttcggtaaatttcaagctcttaatttcatccagcgtgaaatctatcgcgtagtaacgaccgtctttgcgcgcccgatccgggaaacgatcggcaacatcagtaacacgatcgaggtaatggtcatgcagaacaaccagattgtcgtctttggtcatcaccaaatcctgttccagataatccgctccctgcgcatacgccatcgcttttgctggcagcgtatgctccggcaaatatccactggcaccgcgatgggcgatgactattttttcgttgctgtccgccgccattgcactgcttcccatgactatagtgctcatcatgatcgccatgctaaggtttttcagcgtcaatttcatgccattagcctccgttgcgttcttgcagtaattgttcatggcgacgtttttcgccaatcatcacaacaatcaacaagataaccgccagaatgctgccgccaatcattaccataaagccgccatcccagccgaagaagtccacggtgtagccaacaatcgcgctcgccgccacgctaccgcccaggtaaccaaacagcccggtaaagcccgctgccgtacctgccgcttttttcggtgccagttccagcgcatgcagaccgatcagcatcacaggaccgtagatcaggaagccgataacaatcatacaaatcatatcgacggttgggttacctgccgggttcatccagtaaacgatagtcgcgatggtcaccagtgtcataaagaaaacgccggttgccccacggttgccacggaagactttatcgttcatccagccgcacagcagagtgcccggaatacctgcatattcataaaggaagtaggcccaggaggatttatctagcgcgaaatgcttaacctctttcagataagtcggactccagtcgaggatgccgtaacgcagcagataaacgaacacgttggcgatggcgatataccacagcagtttgttcggcagtacgtactgcatgaagatttgcttcgccgtcagctcctgttccgctttttcgttatagtcgtccggataatcatttttgtactcttcgatcggcggcaagccacaggattgcggggtatcgcgcatcatcgcaaaggcgaataatgccaccagaatggcgcagaaagcaggcatatagagcgccgcatgccagtcattgaaccaggccatccccagcaggaacagcagcggcggaataccaccaccgacgttgtgcgcacagttccacacactcacaatgccgccacgttctttctggctccaccagtgcaccatagtacgaccacacggcggccaccccatcccctggaaccaaccgcagaggaacaacagtacaaacatcaccgcaatgctgctcgtcgcccatggcacaaagcccataaacaacatcactgccgccgccagaatcaaacctgcgggcaggaaaacgcgcggattgctgcgatcgcttacgctacccatgatgaatttgctaaatccataagcaatgctgatcccgctaagggcaaaacctaaatcaccgcgactgaatccctgctcaaccagataaggcatagcaagcgcaaagttcttacgaaccaaatagtaagccgcatagccaaagaatatccccaggaaaatttgccagcgcaatcgacgataagtcggatcgatctccgcggcaggtaagcgcgctttgtgtggcgctggtttaaaaatactcaacattgatagcctccgtggcccgtggtcttatttatgattaacagcctgattcagtgagagaacctgccgtttcttgagttgccgcgatgttaagaaaacattcataaattaaatgtgaattgccgcacacattattaaataagatttacaaaatgttcaaaatgacgcatgaaatcacgtttcactttcgaattatgagcgaatatgcgcgaaatcaaacaattcatgtttttactatggctaaatggtaaaaaacgaacttcagagggataacaatgaaaactcgcgacagccaaagtagtgacgtgattatcattggcggcggcgcaacgggagccgggattgcccgcgactgtgccctgcgcgggctgcgcgtgattttggttgagcgccacgacatcgcaaccggtgccaccgggcgtaaccacggcctgctgcacagcggtgcgcgctatgcggtaaccgatgcggaaagcgcccgcgaatgcattagtgaaaaccagatcctgaaacgcattgcacgtcactgcgttgaaccaaccaacggcctgtttatcaccctgccggaagatgacctctccttccaggccacttttattcgcgcctgcgaagaagcagggatcagcgcagaagctatagacccgcagcaagcgcgcattatcgaacctgccgttaacccggcactgattggcgcggtgaaagttccggatggcaccgttgatccatttcgtctgaccgcagcaaacatgctggatgccaaagaacacggtgccgttatccttaccgctcatgaagtcacggggctgattcgtgaaggcgcgacggtgtgcggtgttcgtgtacgtaaccatctcaccggcgaaactcaggcccttcatgcacctgtcgtggttaatgccgctgggatctgggggcaacacattgccgaatatgccgatctgcgcattcgcatgttcccggcgaaaggaagcctgctgatcatggatcaccgcattaaccagcatgtgatcaaccgctgccgtaaaccttccgacgccgatattctggtgcctggcgataccattagcctgattggtaccacctctttacgtattgattacaacgagattgacgataatcgagtgacggcagaagaggttgatattctgctgcgtgaaggggaaaaactggcccccgtgatggcgaaaacgcgcattttgcgggcctattctggcgtgcgcccgctggttgccagcgatgacgacccgagcggacgtaacgtcagccgtggcatcgtgctgctcgaccatgctgaacgcgatggtctggacggatttatcaccatcaccggtggcaaactgatgacctatcggctgatggctgaatgggctaccgacgcggtatgccgcaaactgggcaacacgcgcccctgtacgactgccgatctggcactgcctggtagtcaagaacccgctgaagttaccttgcgtaaagtcatctccctgcctgccccgctgcgcggttctgcggtttatcgtcatggcgatcgcacgcctgcctggctgagcgaaggccgtctgcaccgtagcctggtatgtgagtgcgaagcggtaactgcgggtgaagtgcagtacgcggtagaaaatttaaacgttaatagcctgctggatttacgccgtcgtacccgtgtggggatgggcacctgccagggcgaactctgcgcctgccgcgctgccggactgctgcaacgttttaacgtcacgacgtccgcgcaatctatcgagcaactttccaccttccttaacgaacgctggaaaggcgtgcaacccatcgcctggggagatgcactgcgcgaaagcgaatttacccgctgggtttatcagggattgtgtggtctggagaaggagcagaaagatgcgctttgatactgtcattatgggcggcggcctcgccggattactctgtggcctgcaactgcaaaaacacggcctgcgctgtgccattgtcactcgtggtcaaagcgcactgcatttcagttccggaagcctggatttgctgagccatctgccagatggtcaaccggtgacagacattcacagtggactggaatctttgcgtcagcaggcaccagcccatccttactcccttctcgagccacaacgcgtgctcgatctcgcttgccaggcgcaggcattaatcgctgaaagcggtgcgcaattgcagggcagcgtagaacttgctcaccagcgggttacgccgctcggcactctgcgctctacctggctaagtagcccagaagtccccgtctggccgctgcccgcgaagaaaatatgtgtagtgggaattagcggcctgatggattttcaggcgcaccttgcggcagctagcttgcgtgaactcggccttgccgttgaaaccgcagaaatagagctgccggaactggatgtgctgcgcaataacgccaccgaatttcgcgcggtgaatatcgcccgtttccttgataatgaagaaaactggccgctgttacttgatgcgcttattcctgtcgccaatacctgcgaaatgatcctgatgcccgcctgcttcggtctggccgatgacaaactgtggcgttggttgaatgaaaaactaccttgtagtctgatgcttttgccaacgctgccgccttccgtgctgggcattcgtctgcaaaaccagttacagcgccagtttgtgcgccagggtggcgtgtggatgccgggcgatgaagtgaaaaaagtgacctgtaaaaatggcgtagtgaacgaaatctggacccgcaatcacgccgatattccgctacgtccacgtttcgcggttctcgccagcggcagtttctttagtggcggactggtagcggaacgtaacggcattcgagagccgattctcggccttgatgtgctacaaaccgccacgcggggtgaatggtataagggagatttttttgcgccgcaaccgtggcagcagttcggtgtaaccactgatgagacgctacgcccgagtcaggcagggcaaaccattgaaaacctgtttgccatcggtagcgtgctgggcggatttgatcccatcgcccagggatgcggcggcggtgtttgtgccgtcagtgctttacatgccgctcaacagattgcccaacgcgcaggaggccaacaatgaatgacaccagcttcgaaaactgcattaagtgcaccgtctgcaccaccgcctgcccggtgagccgggtgaatcccggttatccagggccaaaacaagccgggccggatggcgagcgtctgcgtttgaaagatggcgcactgtatgacgaggcgctgaaatattgcatcaactgcaaacgttgtgaagtcgcctgcccgtccgatgtgaagattggcgatattatccagcgcgcgcgggcgaaatatgacaccacgcgcccgagcctgcgtaattttgtgttgagtcataccgacctgatgggtagcgtttccacgccgttcgcaccaatcgtcaacaccgctaccagcctgaaaccggtgcggcagctgcttgatgcggcgttaaaaatcgatcatcgccgcacgctaccgaaatactccttcggcacgttccgtcgctggtatcgcagcgtggcggctcagcaagcacaatataaagaccaggtcgctttctttcacggctgcttcgttaactacaaccatccgcagttaggtaaagatttaattaaagtgctcaacgcaatgggtaccggtgtacaactgctcagcaaagaaaaatgctgcggcgtaccgctaatcgccaacggctttaccgataaagcacgcaaacaggcaattacgaatgtagagagcatccgcgaagctgtgggagtaaaaggcattccggtgattgccacctccagtacctgtacatttgccctgcgcgacgaatacccggaagtgctgaatgtcgacaacaaaggcttgcgcgatcatatcgaactggcaacccgctggctgtggcgcaagctggacgaaggcaaaacgttaccgctgaaaccgctgccgctgaaagtggtttatcacactccgtgccatatggaaaaaatgggctggacgctctacaccctggagctgttgcgtaacatcccggggcttgagttaacggtgctggattcccagtgctgcggtattgcgggtacttacggtttcaaaaaagagaactaccccaccagtcaagccatcggcgcaccactgttccgccagatagaagaaagcggcgcagatctggtggtcaccgactgcgaaacctgtaaatggcagattgagatgtccacaagtcttcgctgcgaacatccgattacgctactggcccaggcgctggcttaaactcctttctgatgcccggtaagcatgtggttaccgggcatttttgcgtacacgattccgtgcccaatgtatgcgttgcaacgcagtgaaaattcctctgaaaacgtctcgcaaaggctgaaactggcagatgtcaaaggcctgggataaccgtaatgtcgcgtcatcataaatatcaggtgacggacaaccatgaccgaaagtacaacctcctccccgcatgatgcggtatttaaaacctttatgttcacacccgaaaccgcacgggattttctcgaaatacatttaccagaaccactgcgcaagctttgcaacctgcaaaccttacgcctggaacccactagttttattgaaaaaagtttacgcgcttactacagcgatgttttgtggtccgtggaaaccagcgacggtgacggctatatctactgcgtgattgaacatcaaagctctgcagaaaagaatatggcttttcggctaatgcgctatgccactgccgccatgcagcgtcaccaggacaaaggctatgacagagtcccgctggtggtgccgttgctgttttatcatggcgaaaccagcccttacccgtacagtctcaactggctggatgagtttgacgatccgcaacttgcccggcagttgtacaccgaagcttttctgttggtggatatcaccatcgtacctgacgatgagatcatgcaacatcggcgtatagctctgctggaactgattcaaaagcatattcgcgaccgcgatttaatcggcatggtcgacaggatcaccacgcttttggttagaggcttcactaatgacagccagctacaaacactgtttaattatctgctgcaatgcggcgatacctcccgtttcacccgttttattgaggagattgccgaacgtagtccactacaaaaggagagattaatgactattgctgaacggctacggcaggaagggcatcaaattggctggcaggaaggtatgcatgaacaagccattaaaattgctttgcgcatgctggagcagggctttgaacgtgagattgtgctggcgacaacccaactcactgatgctgatattccgaactgtcattaaaaggagagattaatgactattgctgaacggctgcggcaggaaggacatcaaattggctggcaggaaggtaaattagaaggtttgcatgaacaagccattaaaattgctttgcgcatgctggaacagggctttgatcgtgaccaggtgctcgcggccacccagctaagcgaagccgatctggcagcgaataaccactaattaacacaggcccacagccgatccccatgggcctttgatatcaataactaccttttatgcgtggcccatttttgccacttttaaacatcgccagtcgttgatccagggcatcgctgtagagcatcgtgtcaacgccaacagcgacaaagttcgctccccacgccaggcattgctgcgccatatcaggagccacagccagaaaaccagccgctttacccgcagcacggatccgccgaatactggtttcaataattcgctgcacttccgggtgcccggcgttatccgggtagcccaagctcgcagaaagatccgcaggtccaataaacacgccatcaatcccttcgacgtcgaggatttcgtccaggttatccagtgccgttttactttccacctgcaccaacagacaaaggctatcgttaacttgcgccatgtaattctcaatgcgtccccagcgcgcagcccgtgccacactggccccgacaccacgctcaccgtagggaggatagcgcgtggcagacaccacctgacgtgcctgttcggcagtatcgaccatcgggatcagtagagtttgcgcgccaatatccaggacttgtttaatcagcggtttactgccttccaccggacggatcacgggttggctggcatagggcgctaccgcctgtagctgatgataaagatcctgaatggtgtttggcgcgtgctccccgtcaatcagcaaccagtcataaccagaagtggcggcaatttctgccatataggcagtcgtactgcttaaccacagaccaatttgcacttcgcccttgcgtaaacgttctttaaagggattgcttaataatgcgttcatcgtgttccttaacctatttaatgatgtgccacgtcggtctgcgcaacagtgcgatttacacgcagagtgaaaataatcaggctaccgatgaccgccaccgctgccagcgtcagtaatcccgccgcatcgctggcaaataacgtttctgctttcacgcgcaggatcggggcaataaacccgcccactgcaccaaacaggtttacaaaaccaattcccgcagccagcgccgtaccggaaagcagttgtgtcggcatcgtccagaacactggctgcacggcaataaacccgatagctgcaacacacagcgctacgatcgccattactggagaaagcagcccggacagaccaataccaatgcccgccgccagtaatgtcagcgctgcgacattacgccgttcgccggttttatcggaatagcgcggaataagccaggtcccaaacaaggccgcaacccacggaatggcggtgaccacgctcgctgtaaagcccacttttgttcccagcaatgccgcaacctgggtcggcaggaagaaaattaatccgtaaaccgccacctgaatggtcaggtagataatcgctagttgccagactcggccattacgcagcgcatcgctcagccgagaagtcactttctgttgttcttcacttgccagttgattgataagcaacgttttttcttgtttactcagaaaacgtgcctgctccggtgtgtcatcaagccaaaagaatgtgaataccccagcaccgactgccaacaatccttcaatcacaaacatccagaaccagccgggatgccccataaatccatgcatctccaacagcgcgccggaaagcggacttcccagtgttaacgccagcggtgcgcccatatagaacagccccataatgctggcgcgattacgctgcggaaaccattggctggtgagataaatcataccagggaaaaatccggcctccgcagcacgaagcagagtgcgaactatcagaaatttcgcttcagtatcggcccatgccatggctgcgctaagaaatccccacagcagtgttgtcgtaccaatccaggttctggcccccagtttgcgcatcaaaagattcgccggaacacccagaaacgcatataccacaaagaaaatgcctgctcccagcgcataagcttcattactcaacccggtatcaatctggtaggtctgtttggcaaaaccgatattgctacggtcgagaaacgccagcacatacagcgccaacataaacggaattaaacgcacacggtttttcttcaccacggcgtcaagcaaagcggtgctcataaaaagctccttagaatatgtgggcgttaccgttgtcacagcaacgcccggagtgattagtggctgtaggggcgtttcaaattgcagtcatgattgagttcgacgccaaaaccgggtttatcaagcacacttttatgaatacgaccattcaccggaaccggctcattgagcagaatcgggtcaaactgcggacgcatcgtactacaatccgggctggtcatcaggaattcgctgaatggcgtattggtgaaggtgatcaccgcatggtgagagtaaacagagctaccgtgcggcaccaccagttgccccctggatttggcgattgcggcaatttccaccagcgtggttaaaccaccgcaccagccaacatccggctgcataatgtcgataccggtttcactaagcgtacgaaaagattgcagtgtgccgtggtgctcaccgctggtgaccatcattccgactggcgcgttgcgtttcagttcgcgataactttcatactgctgtggcggcaggcactcttcgatccatttcaggttatagggcgcgcaagcgtgggccagtttggtcgcatagttcacgtcctgactcatccagcagtcgagcattaaccagaaatcctcaccgcatttttcacgcatatccgcgaccatagcggcatctttgcggatccccgcatcgccatcatgtggcccccagtgcgtcggcattttgccaccgataaagcccatctcttttgccagatccggacgcgcacctgtggcgtagaactgaatctcatcacgaacagcgccgcctaaaagtttataaaccggaagcccgaccactttgccgaacagatcccacagagccagatcgacacaagaaatcgtattcatcaccaggccaccagagccggagtaatacagggtggcactgagcatttgatcgtggatcagtttgatatcactgacacatttaccctcaatgaaacggttaagatgtttttcgacaataaaacagcccatttcaccggctgtgctaacggcgaatccggtctggccgttttctgcttcgacttcaacaaccaacgtgccaagaacgttaatgccaaaactctggcgactctgctcgtaatcgcggtatttactcatcggggtggcaatatgatcgtctatccagtgattcgccccctggtcgtgataatcaccgccgccagcgcctttttctgctgtcgcaccgccagtaaaccaggcgcgaacctgtttaatttttggtagggtcatgatgttctccattgttaactggcttgtaagtcaaagggacttttccatcccaacagacgactaatatccctggcgcaggcaatggccttgcccgccagataatcacggtattcttcattgatttgtaagcgggtaccgaccacgctgatcgcagcggtaagctcgttattggcgttaaacaccggcgcagcgacacaacggacatcggcgtaatcttcgccgttgtcatagctccagccctgacggcgaatacgcgccagttcttcgtgaagttgctgtggatgagtaatcgttgtgggtgtcgcctgctcccagaccagcccttcgataatactttgctgtaccgctgcaggttgccaggcaagcaggcatttacctattccggagcgataaaggctaaggctttttccttcatgggaacgcacgctgatagtggcactactctccactttcaaaatgtaataagcgctgccgttatcaataatccccaggtgacataacagcccggtggtatccatcagttgcgtcaaacgcggtcgagccagttcccggagatccatcttgcttaacgcatgaccggaaagctccaccagcctggtccacaaacaaaaattttcctggtgatcaaggctaagaaaacgctgacgcctgagttcattaagcagcaaataggccgtgcttttagggattcccaatgtgtcaatgatcgtcgcagcactacaggggccaatgcgggcaatcaaattgagaatatcaatagcccgtgtcagggcgggaactttgctactttccaacatactggactccagtcttagatactggaatcagtctcgttgctcagggggagtaaaattgtgaagcgcatcaaatcccgctcctcgtccagcagactggagaaattacgcacaaatttgtgaatcagcgcacggattttttcttattgagtacaacaggttggacaaattttgccggagggggaatgtgccggtgcagtaaaccggcacagagtggcggaatcagacagataaggtcatggactcaacaacctcaatccagccatgctcactggcgatatcctggccgtttaaccaacggcgcagcatattcagtgccatcattgcgcacacttcctgacggatagccaggctgtagcgcgtagtgctgaaacgcacacgcagagcgaaagtgccgtctggcgtggctagcgcaaagttgagatgctcgttctcgaaaccgctaacagccagtgccagcccggcaaaatggttggcccgccgttctgtaatccagtgcgcagtttgcgccagggtttcctcctgactaggaaccacttcacacgccagcaatggagcacctgcgcgagaaagttgcaaagccaataaaccaccggtgaattgctcgctcaacgtcaggctgaactggcggttttgcaattcgcgactgatctgcgcgggcagtccttcagtgccttcgaaaatcacgctctgtccggcaacacgtttaacatccagccacagtttttccatcgcctgttgctcgcttgccggtccggtgagtttcagttcgatgataggcatactggagcgatagcccattgttacgcccggcggcagttgtagagtgtccaggctttgtgccagatcgctttcgctacgaccaaaagtagtcaaacgcagacaaaccggcggctgcggtaaagaaaaacgctcgcgcaggcgcggcaggatttcgtgctcgaccatcaccttaaattcactcggtacgccgggagtaaagaacatcaggcaacgattaagctgcacggcaaaaccacaggcggtgcctaccgggttattgataaattcagcactggcaggcagctccgcttgtttacggttgctcggtgccattactcgtccacgttcgtggaaatagcgttccatctctttgagccaggcttcatgcagcaccaggccttcaccttttgctgtcgcagcggcgagtgcgcttaaatcatcgctggtcggtcccagcccgccgttaacgatcagcacatcggcgtgctgactacgttcgcgaagaatggtgactaagtcatcaaggttatcccccaccgtattgcggcgagataatggcaacccctgatgaaagaaaaaatcggccagccaggcagcgttagtgtcaacgatttgcccgtgtaacacttcatccccggtggataacatttccacttttaacatggttatctcctgcttttgttatcgaatcactataacgcaaagggagataaggcgtagtaagaaactgaatggcgcgacagaatgccgcgccggaagggatcagaaactggcgttaaccccaacatacgggccgtcagccacggcgttgtcgcggttaccgtctttaccgctcagattcaggtagcgataacccgcctcaatactgactggacgcataatggtgtaacgcgcgccagcattcgcttcttcataactttgaataccgctggagaggctatccggagagtagtaatactcgccaaacaaacggaagctgttgccaattttccactgcaaaccacctcctaccgctgcggcataaccttcatcgccgtaattcgggttggtgtaaacgccttttccgccaacggtcgccattaacggcccgagaggcagattcaaccccagccccacgccagcgacatcaccgtcgtcgtcgttatgtgtccagttaccgcttaacgccaggcccgtcgtttcagtcccaaaaccgacaccaatattggtgtattctttacccgcctgaccgctgatgctcattgcattgacgcttgcagaaaccaacagcattccggccagacctgctagcgcaatttttttcattatcccctttcccacaagcaattaatcaaaattcccaaagctgcgggattgtactgcctggcacagaggattcaatgagcgaaaaaaaggatctagtcacttattgtaactaaatacttcttaaataattaaatgccgaaaaaataaacacactttatcgatacacacaaaaataataataagtacagttatcatcgcaaaagagattactgtcactttcacatatttgtgagttaccgtattctcatggtttctttttatttataaggaatatccctgtgcgacaacggactattgtatgccctttgattcaaaatgatggtgcttatttgctgtgtaaaatggccgacgatcgcggcgttttccccggtcaatgggcgattagcggtggcggcgtggagcctggcgaacgaattgaagaggcactacgccgcgaaattcgcgaagaactgggagaacagctgcttttgacagaaatcacgccgtggaccttcagcgatgatattcgcaccaagacgtatgcagatggtcgcaaggaagagatttatatgatttacctgatttttgactgcgtttctgccaaccgagaagtgaaaataaacgaagagtttcaggactacgcgtgggtaaaacctgaagatctggtgcattatgatttgaatgtcgccacccgaaaaacgttacgtttgaaaggtcttctgtaacaatgatgacagccattactggctgtcagattgaaaatttagtggttaacgaattccccatccagataaactttgcctttttccacatgcatgactaaaccatccagataatcaggtttaaatgtcgcgtcacgcttatctttagcaatatatgtcaggcaatgattatgggtgaaaataacgatatttttatcaggcgctttgctttgtaagtccttaattgcactataaatctcattaccgcactgaagaagtcgtttatctaccgtcaattttttacccgcactaaaccaggtagcgctctgaatggtccggacggtattactggaataaagatcgaaatcagggatatcagcactaaaagcgttgcccagttcacgggcatcctgggtacctttaaccgtaatacctgttttatcactcaagcattgattggtactacggtcgcaacgttcagcatgacgaaacaaaacgacaaccgggtgctgctgtgccagtctggccagtgttttattgtcgatacgtggcaaaccattgctactccaggcggcatgagtacccagtccggcaattgcagcgagcgccagtaaaatgatgatatattttttactcttcaagctagagcggcaaaaagctaacacgtaaactccacctatagacaagcgcaaccagacaattaccgtgaaattgagctacatttctggcgataattcgcagttggtgtaatattaaaaatcctacgatgtcggcaaaatgcctcaaaattttgccaaatgcaaagcctaaataagaaaaaatataaaaatttcaatatttacgtctaatattagtttcttaaggttaagttaatattctatccttaaaatttcgctccaaatggcaaaatatacacaacactctttatagcaaatataagtggacaggtattcaatggcggaaggaaaagcaatgagtgaatttttgccttttagccgaccagcaatgggcgtggaggaactcgctgcagttaaagaggttctcgaatccggttggatcacaaccggtccgaagaatcaggcgcttgagcaagctttttgccagttgacgggaaatcagcatgccatcgcggtcagtagtgccaccgccggaatgcatatcacgctaatggcgttgaaaattggcaagggcgatgaagtgattacgccttccctgacctgggttagtaccctcaatatgatttccttgttgggtgcaacgccggtaatggtggatgtcgaccgcgatacgctgatggtcacgcctgaagctatcgagagtgccattacgccacgcactaaagccatcattccggtgcattatgccggtgcgccagcagatattgacgccattcgcgccattggcgaacgttacggcatcgcagttatcgaagatgctgcccatgccgtcggtacgtattacaaagggcgacatattggcgcaaaaggtaccgctatttttagttttcatgccattaaaaatattacctgtgctgaaggtggcctgattgtaactgataatgaaaaccttgcccgccagctacggatgctgaaatttcacggtctgggtgtcgatgcctatgacagacaaacctggggccgtgcaccgcaggctgaagtcttaacaccgggctataagtacaatctgaccgatattaacgccgcgattgccctgacacagttagtcaaattagagcacctcaacacccgtcggcgcgaaattgcccagcaatatcagcaagcactggcagctctcccctttcagccattaagccttcccgcctggccgcacgttcacgcctggcatctgtttattattcgtgtcgatgaacaacgttgtggtatcagtcgcgatgcgttgatggaagcgttaaaagaaagaggcattggtaccgggttacatttccgcgccgctcacacacaaaaatattatcgcgagcgttttcccacgctgagcttaccgaataccgaatggaatagcgaacgcatctgttctttgccgctgttcccggatatgactaccgccgatgccgaccatgtcatcacagcccttcagcaactcgcaggacaataagccatgtttgaaatccaccctgttaagaaagtcagcgtggttattcccgtttataacgagcaggaaagcttaccggaattaatcaggcgcaccaccacagcctgtgaaagcttggggaaagagtatgagatcctgctgattgatgacggcagtagcgataattccgcgcatatgctggtcgaagccagtcaagcggagaacagccatattgtgtctattttgcttaaccgcaattacgggcaacatagtgcgattatggcgggattcagtcacgttactggcgacttaattattacccttgatgccgatctccagaatccgccagaagaaatcccccgcctggtggcaaaagccgatgaaggttacgacgtggtagggactgtacgccagaaccgccaggacagctggtttcgtaaaaccgctagcaagatgattaaccggcttattcagcgcaccactggcaaagcgatgggtgattacggttgtatgctgcgcgcctatcgccgtcatattgtcgatgcgatgttgcactgccatgaacgcagcacctttatcccgattctggcgaatatcttcgcccgccgtgccattgaaattccagtacatcatgccgagcgtgagtttggtgaatccaaatacagttttatgcgcctgattaatttgatgtacgacctggtgacctgccttaccacaacgccgctacgtatgctgagtctgctcggcagcattattgcgattggaggttttagcattgcggtgctgctggtgattttacgcctgaccttcggaccacaatgggcggcagaaggcgtctttatgctatttgccgtgctgtttacttttattggcgctcagtttatcggcatgggattactcggtgaatatatcggcaggatctacaccgatgtccgcgcccgcccccgctattttgttcagcaagttatccgtccatccagcaaggaaaatgaataatgaaaaccgtcgtttttgcctaccacgatatgggatgcctcggtattgaagccctgctggctgccggttacgaaattagcgccatttttacccatactgataatcccggtgaaaaagccttttatggtagcgtggctcgtctggcggcggaaagaggcattccggtttatgcgccggataacgttaatcatccgctgtgggtggaacgcattgcccaactgagcccagatgtgattttctctttttattatcgccatcttatttacgacgaaattttgcagctcgctcccgcaggtgcatttaatctgcatggtagcctgttaccaaaatatcgtggtcgcgcgccgctgaactgggtgctggtcaacggtgaaacggaaactggcgttacattgcaccgaatggtgaaacgtgccgatgccggggccattgtggcgcaactgcgcattgccattgcgccagacgatatcgctattacgctgcatcataaattgtgccatgccgcgcgccagctactggaacagacattacccgccattaaacacggtaatattctggaaatcgcccagcgcgaaaacgaagccacctgttttggtcgcagaacgccggatgacagtttccttgaatggcataaaccggcatccgtactgcacaacatggtacgtgccgttgccgatccgtggccgggtgccttcagctatgttggcaatcagaaattcaccgtctggagcagccgtgttcatcctcatgccagcaaagcacagccggggagcgtgatttctgttgcgccactgctgattgcctgtggcgatggcgcgctggaaatcgtcaccggacaggcgggcgacggcattactatgcagggcagccaattagcgcagacgctgggcctggtgcaaggtagtcgcttgaatagccagcctgcctgcaccgcccgacgccgtacccgggtactcatcctcggggtgaatggctttattggcaaccatctgacagaacgcctgctgcgcgaagatcattatgaagtttacggtctggatattggcagcgatgcgataagccgttttctgaatcatccgcattttcactttgttgaaggcgatatcagtattcattccgaatggattgagtatcatgtcaaaaaatgtgatgtcgtcttgccgctggtggcgatagccacgccgattgaatatacccgcaacccgctgcgcgtatttgaactcgattttgaagagaatctgcgcattatccgctactgcgtgaagtaccgtaagcgaatcatcttcccgagtactagtgaagtttatgggatgtgtagcgataaatacttcgatgaggaccattctaatttaatcgtcggcccggtgaataaaccacgctggatttatagcgtaagtaaacaattacttgatcgggtgatctgggcctatggcgaaaaagagggtttacagttcaccctcttccgcccgtttaactggatgggaccacgactggataaccttaatgcagcgcgaattggcagctcccgcgctattacgcaactcattctcaatctggtagaaggtagtccgattaagctgattgatggcggaaaacaaaaacgctgctttactgatattcgcgatggtatcgaggcgttataccgcattatcgaaaatgcgggaaatcgctgcgacggtgaaattatcaacattggcaatcctgagaacgaagcgagcattgaggaactgggcgagatgctgctggcgagcttcgaaaaacatccgctgcgccatcatttcccaccgtttgcgggctttcgcgttgtcgaaagtagcagctactacggcaaaggatatcaggacgtagagcatcgtaaaccgagcatccgcaatgcccaccgctgcctggactgggagccgaaaattgatatgcaggaaaccatcgacgaaacgctggatttcttcctgcgcaccgttgatcttacggataaaccaagttgacctaagatcttacggataaaccatcatgaccaaagtaggcttacgcattgatgtcgatacctttcgtggcacccgtgaaggcgtgccgcgtctgctggaaatcttgagtaagcataatattcaggccagcatttttttcagcgtcggcccggacaatatgggccgccatctctggcgactggtgaagccacagtttttgtggaagatgctgcgcagtaacgcggcaagcctttatggctgggatattttactggcaggtacggcctggccaggtaaagagattggtcatgccaatgccgatatcattcgtgaagcggctaaacatcacgaagtcggcctgcacgcctgggatcaccatgcctggcaagcccgtagcggtaactgggatcggcaaacaatgatcgacgatattgcacgcggtcttcgcactctggaagagattatcggtcaaccggtaacctgttctgccgctgcgggctggcgtgccgaccagaaggtgatcgaagcaaaagaagcgttccatttgcgctacaacagcgattgtcgtggggccatgccgttccgtccattgctcgaaagtggaaaccctggcactgcgcaaattccggtgaccttacccacctgggatgaagtgattggtcgggatgtgaaagcagaagattttaacggttggttactcaaccgcatcctgcgagataaaggcacgccggtttataccattcatgcagaagttgaaggctgcgcttatcagcataattttgtggatctcctcaaacgcgcagctcaggaaggcgtgacattttgccctttaagcgaactgttaagtgagacgttgccgctcggacaagttgttcgcggaaatattgccggacgtgaaggctggctgggttgccaacaaattgcgggtagtcgctgatgaaaagcgtacgttaccttatcggcctcttcgcgtttattgcctgctattacctgttaccgatcagcacgcgtctgctctggcaacccgatgaaacgcgttatgcggaaatcagtcgagaaatgctggcatccggcgactggattgtgccccatctgttagggctacgttatttcgaaaaacccattgccggatactggattaacagcattgggcaatggctatttggcgcgaataactttggtgtgcgggcaggcgttatctttgcgaccctgttaactgccgcgctggtgacctggtttactctgcgcttatggcgcgataaacgtctggctctactcgccacagtaatttatctcagtttgtttattgtctatgccatcggcacttatgccgtgctcgatccgtttattgcattctggctggtggcgggaatgtgcagcttctggctggcaatgcaggcacagacgtggaaaggcaaaagcgcaggatttttactgctgggaatcacctgcggcatgggggtgatgaccaaaggttttctcgcccttgccgtgccggtattaagcgtgctgccatgggtagcgacgcaaaaacgctggaaagatctctttatttacggctggctggcggttatcagttgcgtactgacggttctcccttggggactggcgatagcgcagcgggagcctaacttctggcactattttttctgggttgagcatattcaacgctttgcactggatgatgcccaacatagagctccgttctggtactacgtgccggtcatcattgccggtagcctgccgtggctgggattactccccggtgcactgtacacaggctggaaaaaccgcaagcattccgcaaccgtctatttgttgagctggacgataatgccgctgctgtttttctccgtcgctaaaggtaaattgcccacctatattctttcctgctttgcatctctggcaatgctgatggcgcattacgctttgctggcagcaaaaaataatcctctggcgctgcggattaatggctggattaacatcgcttttggcgtcactggcattattgccacatttgtggtctccccgtggggaccaatgaacacgccggtgtggcaaaccttcgagagctataaagtcttttgtgcctggagcatttttagcctatgggcatttttcggctggtacaccttaacaaacgtcgaaaagacctggccttttgccgcgctttgcccgctggggctggcgttgctggtaggatttagtattcctgacagagttatggaaggaaaacatccgcaattttttgtcgagatgacacaagaaagtcttcagccaagccgctatattcttactgatagcgtcggtgttgccgcaggtctggcatggagcctgcaacgcgatgacatcatcatgtatcgccagacaggtgagttgaaatacggccttaattatccggatgcgaaagggagatttgtcagcggtgatgagttcgcaaactggcttaatcaacatcgtcaggaggggattattactctcgtgcttagcgttgaccgcgatgaagatatcaacagtctcgccattccgcccgcagatgccatcgatcgtcaggagcgtctggtgctgattcagtatcgtcccaaatgatctggctaacattagtctttgccagcttgcttagcgttgccgggcagttgtgtcagaaacaggcaacctgctttgtggcgataaacaaacggcgcaaacatatcgtgctgtggctgggactggcgctggcttgtcttggtcttgccatggtgctctggctgctggtcttgcagaacgtaccggtaggcattgcttacccgatgttaagtctgaattttgtctgggtgacgctggctgcagtaaaactgtggcacgaaccggtaagcccgcgtcactggtgtggggtggcgttcattattggcggcattgtgatcctcgggagtacggtgtaatgggcctgatgtggggattattcagcgtcattattgccagtgttgcgcaattaagcctgggttttgcggcgagtcatctgccgccgatgacgcacttatgggattttatcgcggctctgttagcttttggcctggatgcccggatactgttactcgggctgctgggttatctgctttccgttttttgttggtataaaacgcttcataaacttgcgctaagcaaagcctatgccttgctcagtatgagttatgtgctggtatggattgctagtatggtacttcccggctgggaagggacttttagcctgaaagcactactgggagtagcctgtattatgagcgggttgatgctgattttcctgcccacgacaaaacaacgttactgagttttccctgccactttacactgccgttcccactcatcggggctataactgcttgcgctgaggactttcaccgtatgcagcttttcacgattaatacaataaagcgcattctgcaaagggctgagtaaatcccccactttcacggcgaagtcactcttcacttcggcgatcatttttatcgcgccgccagcatcgcagagcataagtacatgtctgttatcttgtttattgcagcagctttttttgaccagccattccattgcattatcctgtttgctaagagttttcacatcaatttacagattaacagataaactctttatcaacggcaatggaatggcagaaatgagaagtgaaacggagggttaattattgctgacgttgcacccactcttttagcgcctgacgactaattttaataccgccgtttttcagctccggcggcagagttagccagcgcaccggttgttgaaaacgggccagcttatctttcacccattcactaagatcaacgctctcgtggtcatactccatcaccgccaccggtcgatgaccaaactccttgtcggcaacggggacgataaacacctgcaaaaccgcaggatgtgcagcaattacgcgctcgacttcttccggctgaataccctctccgccactgaagaatagattgtctaaacgtccgacaatggtcagcttgccattatgcatctcaccgcgatcgcgcgtagcgtaccagccttcgtcattaaccagactaaccagttgcccgttacgccagtaaccttctgccatactggcagcccgcagccacacttcattattaacgattttcacttcccgacccggcagcgggctaccaacgtctgccaggccgtcggcttctttcgcacacaccgtggaggcaaactcggtcagaccatagccgcaaaagcaacgaatcccctgctcgcgcgcctgttccgtcaactcgaccgggatagccgcgccgccaagtaacaccgctttcagggaaacggaactacggttaaccagcaaacgccagagttgtgttggcaccagactagcgtgagtacagcctgccagcatttgctccaatggctgtttatcacgtaccgtcatccgcgcaccagcgtataaccagcgccacataattccctgaccggagacgtgaaacagcggtaaagagagcaaccaatcatcgtgatcgccaaacggaatcaggcttaacacaccttgcgcactggcaagatgggcctgataagtatggacagcggctttcggcaaaccggtagaaccgctggtcaacgtcatactgcacagacgcgtcggctgccacgtagcggcatgtgcgccttcaaccagctgaatgtgcaggctcgttaatgccggaaacgtgttttccccatccggcaccagagcaaattgcagcgtcagattgggcagcaattcttcaagcaacggttgcggcagctgagggttcacgggcaacacccgcgccccgcattgcagtaacgccagccaggcgagcagcgtttgcggcgtattccacgcccgcaacatcacgccgctgccctcaaccaccccctgcaccgcaaatccggaggctaattcatcgacgcgagcacaaagctcgcgccagttgagttgctcgtcattaagacgtaaggcgatggtttctccccgcacttgccgccagtgacgccacggccagtcagagaagatcataacaaccgctccagtgcatcaacttccacgacaggcagcgtgctacccggccagcgacgtacctgctgcgcctgcatcagatccagcgtgtccagccctggaatggtgtccggcgttaaccaggcggcaatccgcgccagttgcgttaagcctaagctgctttcaatggaagaactgatcaccgccgtcagccccagcgcgtgcgccgcctgtacctgctcgcgtactttttccagactgcccgtgagcgtgggtttgataactaccgcgcgcacgccctcttcagccacaaaggcaaaatccggctcgcgcaggctttcatcccaggcaatggcaatgccggtttcacgggcaaacgctcggctatcatcgcgggttttgcacggctcttcgagaaacgcgatgcggtcgcgataatccgggttaacgtatttggcaaactgctgacctttcagcggtgtccaggcgcgatttgcgtcaagacgcaaatgcagatccggaattgcctccagcaacagattcaccaccatgccgtcgcgcaccgcttcgtacaatcccactttgaccttcgccactttctcgcctggcatatctgcaagtttgaggatcagatcgtccggatcgccattacacagcggtgccgcacggtagttggctgcttgcggcaacgtatctgtcagttctgccaatgcacagcttacgccaaaggccacggaaggcatctgcggtagctcgcaatcgcctgccagccagttatttacccaggcaagcagcacactttgcgcctcttcccaggtttcctgactgaagcccggcagtggggagatctccccccacccttcgcgctcgccttcacgcaggcaaacatacagcccgtcgcgggtttttaaccgcctgtcgcgcagaaccacccccgcgtccatggggatctgccagcggtatacctgcgcgctacgcattacggattccgtttgaatttgctgaagtcaggctgacgtttctggttgaaggcgttgcgaccttcctgaccttcttccgtcatgtagaacagcatggtggcgttgcccgccagctcctgcagccccgcctgcccgtcacagtcggcgttcagtgcagctttcaggcagcgcagcgccatcgggctgttttgcagcatttcgcggcaccaacggacggtttctttttccagatccgccagcggtaccacggtgttcacaaggcccatatccagcgcctgttttgcgtcgtactgacggcacaggaaccagatttcacgcgcttttttctgcccgacgatgcgagccatgtaggaagcgccccagccgccgtcgaaggaaccgactttcgggccagtctgaccgaagatggcattatctgccgcgatagtcaggtcgcacatcatgtgcagaacgtgaccgccgccgatggagtagccagccaccatcgcgacaaccggtttcggacaggtacggatctgacgctggaagtccagcacattcaggtgatgtacgccggaatcatctttatagccgccgtaatcaccacgcactttctggtcaccaccggagcagaacgctttatcgcctgcaccagtcagaatgatcacgccgatgttgtcgtcataacgcgcatctgccagcgcctggatcatctcttttaccgtcagaggacggaaggcattgcgcacctgcggacgattaatggtgatttttgcgataccgtcggtggatttttcataacgaatgtcctcgaaaccttcggagcagtcgtgccattcaaccggtgcgtaaagcattgcttcatcaggataaatcatattgtgtcctttagtcagaaacgcaagatctgcgccagacttgcgattacgccagcgggattttcccgatgcgcgttatgtccggcgcgaggaatgacatggcagtcggcagccagttccgccgccagggcgcggaatttgctgtcacgttcaccacataaataataaaacgcaaatgtgcgggcgctaaggttagcacgtaaatcaggctggacggcgagagaagtcgcctccagcatggcggcaagcgttgcgccattattgttgctgcgcagcgccaccagctcccggcgttgatcgtcattgagactggcaaaaacaggctgttgataccagtcggcaaataccgccgttaacggttctgtgagaaaacgctgcacccattggcgatcggaacgctgacgttccgcacgttgttcagcattttgcagccccggatgcccgccttcgacaataaccccacaaagccccgccagcccctggcaagccgccatcatcgccacccgtccaccaaggctgtaccccaccagccagaagtcaaggatgttgtaactaaccaaggttttacgcagtaagtcggtgacatcatcaaatccatcgacgctaatcgccgcgctaccaccgtgacctgggagatcaacatacaaccgactgtagtcggcaaacgcctcgcccacttcttgccattcgtggcaatcgccggaaaaaccgtgcaaaaacaccagccagggtaaacctggttttccgtgttttgcctgcgcgtgcaggatcataaatggcttacctgcgccagaagttgctggagcgtttgcgcaccatcggtgtcgttaaccaccatttcaatcaccgtggtggttggcgtgcgccaggcgtcggcaaatgccgtttcaagttcctgccagttttgcggacgatgatatttcagctcgaacatcgcggcggcgtgctcaaaatggacgttttgcggcatcagatagaaacgctcacgctcgctttgcggcgttggcaacaggctgaaaatttgcccgccgttgttgttcaccacaattaataccagcggcgcagaaacctgacgcaataacgccagcgcgttgagatcgtaaagtgcggagagatcgcccacaatcgccagcgtcggtttgccgcttgcccgctgaacgccggcggcggtgctaagcagcccgtcgataccgctggccccacggttgctgtacaccgggtaacctgccggaagttggctaagcgcatcaatcagacgtaccaccaggctgttaccaacaaacaattgcccctgttcaggcagatagtcgcagatgcgatgcgccagttgcgcttcgccaaacgcatcacggcgggcaataaccgcctgcattgcctgttccgccaggcgcgggatttcaacgcaccagggctggcgtttttctgccggatgcagctccagccagtcggcaatattggcaattaagcgacgtccgcgatggtgtgccggatcaagtcgcccttcaatgtcatcaacaatccagtactcttctggttcacagcttgcctgccattgcaggagccgtttccccgtcaggctgcttcccagttgcaccacaatttgcgcctgctgcagctcgctggtcgctttggcattgcctaaccaaagatcggcacacggcagcggctgcccggtttgactcagcacatcgccaatcagcggccagccaagagtttgcgcccacagggcaacttttttgccctcttccgcactcatgcgcccggcaaccaccacgccgcgcttttgtcgccagaagaaccagtcgcgctgtttttcactttccagacgaggcgcttcacgcagccacggtttgtcttcctgccaccagtcacccagacgctgttgccagctaagcccggtatcgtccatttcgccatacagcggttcagcaaacgggcagttgatatggactccccccgcatgaagcgtaccgagagcgtggtcgatggtagaaaccagccaacgtgcggggatatcctgggtcgggcgcggcaaactaatactgtgcgtggggtgagaggcgaacattcccggctggcgaattgcctgattcgcgccgcagtcaattagctccggcgggcgatcggcggttaagagaatcagtttttctccggttaacccggcttcaatcagtgccggatagagatttgccaccgccgtgccggaggtcacaatcaccgccaccggctgcttgctgactttcgccagccccagcgccagatgccccaacccacgctcatcgaaatgggtgtggtgaatgaatgcggaattctccgccgccgctaacgttaacggtgtagaacggctgcctggggcgatacagatgtgtctgacgccgtgacgcgttaatgcttccagaatgaccgccgcccagcgtcggttaaatgcgcttacactcatgagtttgtccggtatcaatattgcggctaagtataaggagctacaaaaatagattattgatatgaatcggtaatgatgcgactcattattattccatttgtaataaagtacgcagccctgccgctttgttgtcgatttcctgccactcttgctcggggtcggaaccacggacaatgcccgcgccagcatataatcgcacgacattgccgctaatttttgcactgcgcagggaaacgcagaattcgctttgttgtaaactgagatagcccgcagaaccggcgtaccattctcgggtgaacggttcgtgacgggcgataaactgtcgcgccagatcgcgcggtaagccagcaactgctgccgttggctgcaactgatgtaaacagatcacatcatccgctttgttgagactagtccagatacagcggcgaagatgctgcactttacgcagacgcagtacctgcggcggtaaaacatccagcgtctgggtatcggcctgtaatcgttgacagatatcttccaccaccagcatgttctcgcgctggtttttatcatccgccatcagccactctcctaactgctgcgcctgcttatcatcaggattatttgctactgttcccgccagcgcttcagtacgcagcgctttgtcacgccgccgccataaccgttccggactagagccaagaaaagcattttcgccatcaaaggccatgtaaaaatggtagcaattcagattcagtcgacgactggcagccatcatcgccgccgcgttgaccggacttgcgaaatgcaggtcagttgcccgagcgagcaccactttgtcgagctcaccttcggcgatggttttcgttgccagttcgattaattgcgtccagcccgttttgtccggccagtgttgttctcgcgtggtggttaaatgtaacccaggcaagggcttgatactcaccagtgtggcgataaattcttttgcctgaatcgcatcgtgctgaagggagctttcgctgaatagcgtcagccgcagcgtggctttaccgccacagcgtcgccattccaggcggggtaaaagtaaattgccctggctcgggtcaaaagcattcagcccccaaatgcgtaagtcggcgtgttccgggtgctggcgaagaaaacgttgtgcctggtccaagctcgtaaaacgggtaatcgcgcccaggacgacagcttcttcatcaccattacgttgttgccagtagaattgcgggtatgtttgctgactggccagccagctcaaggcatcaaaagcgtctttgagagggaaaggaatatcgataacccgaatgccgggtgtcgccggaatctcttggctcaaatggcgcagtagattttccagcgccgtagtaagactttgcacgcggacctctccctgttaaaagcctcacattatacggggtactacaaaaaaaatgcagtaccccggtgtagggaggttttaacggcgtgccagcaacagtcctagtaccagcccaacggccgcgcccacaccaattccttgccagggtttttcgtggacgtagtcatcagcacgataaactgcctgcttcgcccgatagtaataactgtcactagcctggctaacccgttttttcacatcatccagcgctttttctgcacgcgctttcagctcaacatatttctgatcggcgggatcgccagaggagcggagcacctcttccagtgtttcactaagcagcgtcaggtcgtcatcgatacgtgtatcaccaaactgattagacattctcgttctccatttgcgtaaaacctgtcactaactatagacaagggttgttgattacgcctgaattacctcgcgtgccatcccaatgtgtgggataccatcttcttcatagacctccgtcacagggataaaaccgaaactctggtagaagttttgcagatgcgcctgcgccccgaggtaaacaggcttatcaggccagtgatgcgtacatgtttcgagtgttttactcatcagctgctgccccactttttcgccacgcaacgcttcactgacaatcacccgacctataacgaccggctcaagatcatcatcacttttcagaatcctcgcatacgccaccagttcatcatttttccaaccgagaatatggcgattatcccccgtcaaatcatcaccatcgatatcctgataagggcaattctgctcgacaacaaacaccgcgcaacgcagttgtaataaggcataaagctgggaaacgcttaattcagagtgatgcagatcttgccattcaatcataatgctctccttttagatgtatgccttatactagccggaatattttttgaaacgtgatgaactcatggaattaatttttttaggtactagtgccggtgtgccaacccgcacgcgcaatgtcacggcaatattgcttaacctgcaacatccgacccagagcggactttggttgtttgactgcggtgaaggcacccagcatcagctactgcataccgcctttaaccctggaaaactggacaagatttttatcagtcaccttcatggcgatcatctttttggtttacccggcttgctgtgcagtcgttctatgagtggcattatccaacccttaacgatttatggtccgcaaggtatccgtgaatttgtggaaaccgcgctgcggattagcggcagttggaccgattatccgctggaaattgtcgaaattggcgctggcgaaattctcgatgatggcctgcgcaaagtaaccgcttatccgctggaacacccactggaatgttatggctatcgtattgaagaacatgataaaccgggtgcattaaatgcccaggcattaaaagctgctggcgtgccgcctggcccactgtttcaggaattaaaagcgggcaaaacaatcacgctggaagatggaaggcagattaacggcgcagattacttagctgctccagtgccaggtaaagcgctcgctattttcggcgataccggcccctgcgatgccgcacttgacctggctaaaggtgtcgatgtcatggtgcacgaagcgacgctggatataaccatggaagccaaagccaatagtcgcggccatagctctacacgccaggctgcgacactagcccgtgaggctggagtcggcaagctaatcattacccacgtcagcagccgctatgatgacaaaggttgtcagcacctgttacgtgaatgcaggagtattttcccggcgactgaactggcgaatgatttcaccgtgtttaacgtttaactctgcttattattaaaaacagggcgaaacttgccctgttatcgcaacccgcgctacatatatccacccacacaggcatattgagcgatttttgatatttattcatctccttacgcactatattcagagcaataagttgcctcttttcatcttgattcagcacaacctttgcaactaaaaggagcccatgatggttacagttgtcagcaattattgtcaattatctcaaacgcaactcagtcagacatttgcagaaaaatttactgtgaccgaggaattactgcagtctttaaaaaaaacagcgttatccggagatgaagaaagcattgagttactgcataatattgcgttaggttatgataaatttgggaaagaagctgaagatattctttaccatattgttagaaccccaacaaatgagaccctaagcattatccgacttatcaaaaatgcttgtttaaaattatataatctggcacatatcgcaaccaactcccccctcaaaagtcatgatagtgatgatctcctgttcaaaaaactattctcccctagcaaattaatgacaattatcggtgatgaaattcctcttatatctgaaaaacagagccttagtaaggtgcttttaaatgatgagaataatgaactgagtgatggtacaaacttctgggataaaaatcgtcaattaaccacagatgaaatagcttgctatcttcagaagatcgccgctaatgcaaaaaatactcaagtcaattatcctactggtctctacgtcccctactccaccagaactcacctggaagacgctctcaatgaaaatattaagagcgatccaagttggccgaatgaagtccagttattccccataaatactggcggacactggatattagttagcctacagaaaatagtaaataaaaaaaataataaactacaaataaaatgcgtcatattcaacagtttgcgtgcactaggctatgataaagaaaatagtcttaagcgtgtcattaatagttttaattctgaactcatgggagaaatgagcaataataatataaaagttcatttaaatgaaccagagataatatttttacatgccgatcttcagcaatacttaagccaaagttgcggtgcatttgtgtgcatggcagcccaggaagtgattgaacaaagggaaagcaattctgacagcgccccctatacgttattaaaaaaccatgctgacagatttaaaaaatatagtgcagaagagcagtacgaaattgattttcaacatcgactggcaaacagaaattgttatttagataaatatggcgatgcaaatatcaatcattattatagaaacttagaaataaaacacagtcaacccaaaaatagagcatccggcaaaagagtgagttaacatcattgttaattaattcgaccagtcagcaaatatgctgactggtcgaacatagtttgctaaacagtcatcactgactgatgtcagtcacaccatccgccagttcaatcaggcgaataaattccgccctgtaaccctgtggatcttccccttttgcctgctgagcccactgtttgatctgctgccaggaggtattgttcaggtattcagaaccgcgtaacttttgcccatatgcagctactgctgcgcgaaaacgcatatcttcagagggcgcgtttattgttggccccagcgggaattcaactaactgactttcttttccctgcgggtatttccagcgaatttttaaccaggccagttctttcgttttgtcgcttttcgctaatttgttatccggggcatagcgtaacttatcaatacttgctttttgcccgttcagcgttaattcgaataacaacgttatatgtttgcctgcgcctatatcccctgcatcaacgttgtcgttattaaaatgttccacccgaagttggcgcttttcataaccaatctgacggtattccgttacccacgcggggttaaactcaatttgcgctttgacatcttttgctacggtaatcaacatctgccgcatttcactattcaatactttctgcgcttcagagagggtatcaatgtagctgtagttgccgttaccaacatcggcaattcgcaccatcattgcctcgttgtaattgctattccccacgccaaacgtgctcagagtaacaccagactcccgctgttttttgaccatactttcaatgctttttggatcgtcaatgccaacgttaaagtcaccgtcagtggctaataaaatgcgattgatgccgcccttaataaaccccttcgtcgcctgctgataagccagttccagcccggcaccgccattggtactgccttcggcatccaggctatcaattgcggcattaatttccgccttatgactcccggagatagaaggcaatgcaatacgggagtcgccagcgtaggtcacgatggcaatgttatcctgctcacgaagttctttgaccaataatttcaagctagactggataagtggcaaacgttcatcagaaatcatactaccagaagtgtcgataagaaagaccagattagaagctggtaactcttcacttttgcgatctttcgccaggatatcaactttcagcaatgttcgctgttcattccatggtgcaggtgccaattcgtagcgcatagcgaaaggtattggcttagaggccggaatagattgtttgtctttgatatcccaatcagacgggaaataattgactatctcctccacccgcacagcgtctggcggaggtaacagcccttgattgaggaaacgccttacattcgcataactgccagtgtcaacgtcaagactaaacgtcgccaacggattttgcgctacctgcttaaccggattatcatcgaactgctggtagcgagcggttcctggatttgcgatatgtgtagcttttgctttagccgctcttgcaaatgttggcgcttcctgcaatcgcccctgtaaagcctgtttgtcactatattgttgcacttcttgctgggccaaggctttcgcggcggcggcgctttgctcagcctcttttattgcagcttgctgcgcggcaagcacttgctgctctgtgggagtactgggttgttgttgctgactttccttattctcaggttgcggcccacatccactcaaaatcaaactactcataagcaacatgattatatttttatttcgcatataaaatccttttaaataaactcaggcaccagacataaaatatactctttgtataatcctgctaatcttaataaaatacaatatcgaaacccatagcaaataatgattcaacaacgcaacccattaataatttgcatatgaaaaaaataatctttgcttttattatattatttgtgtttttactccctatgattattttttaccaaccctgggtcaatgcattaccgagtacgccccgacacgcaagtcctgagcaattagaaaaaacagttcgttatcttacacaaactgtgcatccacgtagtgccgacaatattgataatctgaataggtccgcagaatatataaaagaggtctttgtcagtagcggtgccagagttaccagccaggacgtccccattacgggtggcccctacaaaaacattgttgctgattatggtcctgccgatggaccgctgattattattggtgcgcattatgactctgccagcagttatgaaaacgatcaattgacctatacgccgggcgcggatgataacgccagcggtgtggcaggattactcgaactggcacgtttgttacatcagcaagtaccgaaaacaggcgtgcagctggtcgcctatgcgagcgaagaaccgcccttctttcgtagcgatgaaatggggagcgcggtgcatgcagctagccttgagcgtccagtgaaattaatgatagcactggagatgattggctattacgactctgcgcctggaagccagaattacccttacccggcaatgtcctggctttatcccgatcggggagactttattgccgtggtcggcagaatacaggatatcaacgccgttcgtcaggtaaaagcggcattgttgagttctcaggatttatctgtttattctatgaataccccagggtttattcccggtattgatttctctgaccacctgaattattggcaacacgatattcccgccataatgattactgacaccgctttttatcgtaataaacaataccacttgcccggtgataccgcagacagattgaattatcagaaaatggctcaggtagtggatggtgttataactttgttatacaacagtaaataataaaaatttctcgaggcgggtccagaaaaagcgacatgcacattttattttccctcatctgttttaagatgcgaaacatgaaattcaacggaggaaaaataaatgggaatgattggctattttgcagaaattgacagtgaaaagattaaccaactgcttgagtctactgaaaaacctttgatggataatatacatgacacgcttagtggattacgccgactggatattgataaacgctgggattttttacactttgggctgacaggcacctctgcttttgatcccgcgaagaatgatccgctgagtcgtgccgtgcttggtgaacacagcctcgaagatggcatagatggcttccttggattgacctggaatcaggagttagccgcgacaatcgaccgactggaaagtctggatcgaaatgaactgcgtaaacagttttccattaagcgactcaatgaaatggagatttatccgggagtgacctttagtgaagagttagaggggcaactctttgccagcatcatgcttgatatggaaaagctgattagcgcgtatcgacgtatgctgcgacaagggaatcatgcgctgacggttattgttgggtgatatagcttgatgcctgggggagaaagacccattagttaagatttacgccaggatcatcttgaaaaaatctttaaccatggtccggtttttatccccttgtataaatattactaaatgcttgcttagtcgcattgttaaatgcaataccgtatattcggtatgtaacagcgatatcctctgtgctggcaacgatctgtcatgcttgatgaaaacggaattgaacctgtcattaccaggtagataaaaagcctgttcaattttgggattattttttataactcgtgtctgttatggcgacacgggaaaacatcaatattgtccttcacaaattgcagtaatatagaatcaacctctcttgcaagttggtcacaatgtattataagcattttgaatatgtcatcctctgtaatctcgtgaaaattttcggccttgtcttttagctcatcatatcggattcttgcagtaaccattttttgggcgagttctaataaccccaaagcttgcaattgctggtgagtatgatcactttcaaaaaatatcccacactccattccttcccaaccaacatattcatgccattcataaaccagcataaatgtttgtaaaactggcggtaataattggatatctgcaaaaccaaaccaaaacttacgcttgagatcccactcatattcaatcgccaatgctatattgtttaaggcatctccggcatccttatttttacgcaaaatcaattccgtcagtgtatagcgttgttcatcaatacgccgaagagcttctgcaatatcatagtttgtagccaacaaaacattctctgcttcctgatgagtgacgtctgcttttgccgtcaatatattgatttggtcaatatgaaacaacttgatggcttcatcaacatcaccgccagtcctctctaacaaacgtctggcaacctggataccgacaggtacgttcttccgaagtttacgaatttcacttaaccattccatgtcaaacccctttaaatatttatgatattaaatataacaacgtctggataacgacccggcctgactgaatatctcacgttttcctgcttaacattcatgttatgatgctcttgaaactaataatacgtatggaattgtcactatttatctgctaatgaatagtaacaatgtcattcgtttgatgaatatattatttcagggaataattatgacacctttagaacgcattacccaacttgttaatatcaatggtgatgttaataatcctgatactcctcgtccattgttatctcttgaggatttttttattgacaataatatccatggtagtatatgttgcaatgtgattccagaacaatctccgcaagctatctatcaccattttctgaaaatacgtgagcgtaacaatgttagtgatgttttggtagaaattacgatgttcgatgacccagactggccctttagtgaaagtattttagttatcaccactgctagtccagaagaagttcagagctggtttgtagaagaaattgcccctgatgagtgctgggaaggatggagtgaagatacggagcatggatgggttgaagtccctgtgggtatgcatccggttacttgttggtgggattaaaacatttatataaacagataagcggatgtttacataaatttttatgtgaaggaacatgatgaaacttattcctcgcagtagtgatattagtcctggcattgatggaatttgcccggggccttttcctccgaacggatttaccgtacttacagatgcagcatatggtaacggagactgtttcggtttgtactggcctattggtcaggagcataaactacctatagtgtgcgaaacgtaccatgacgaatggcgaatcgtacctgccttttccagcattaagaagttcgaagaatggctggaagtgaatgatgatgatccccatgaaaatggcatcagcatcgaagatcaagactttgcagcaaatctcttccgtgttgctcggaaatgtcttagtacgggaaggcttgatgacgcactgccactgttacagcgagcaacagaacaattgcctgaagtcagcgaatattggttagcactggcaatccagtatcgccgatgtaaaaaaacagaagctgcagcacaggctgcgcttaatgcttatcttggcaattgggcatttggtgttcctgacaataaagtcattcatttgctgagtcaggccgcagatgtcccgaatttccaggatgatcctgtgattcagtgcattaaagaacaaggattagatcttagctttggaggaacaaaggaaaataataattaccccttgatgcagatgtgtgttgatacttattttgcgcagagaaaaccgcttcaggcattaaccctgttacataattatgcctggataatgtccagtgaaacgactgcatttcaggaacgctatgattttaatatcgatgaatggcgggcaaaattcaggcagttatgtttagagtattttggcgatagtcgtacacagttcacttaacgctctgcgtctatctactatcccttctttttcagaaaaaccgccgagcatgtcggcggctttctgacttacaaagtaacagattacatcagcggcattgccaaacgcacaatgctaatcagcggttgtggccatacacccagcaccagtaccaacagtgcagagatcagcacaacgataccgcccgcgctgtactgccagttacttggtgcatcgcgacccggttgttccggggcgtgaagatacaggctcaccgccacgcgcaggtagtagtagaggccgattgcgctaccgacaaccacggcacccaccagccaccacaagtgtgcctggacaccgaccgccagcacgtagaacttaccgataaagcccagcgtcatcgggataccggccagagacagcatcatcaccgtcatcactgccgcgaggatcggacgatgccagaacagaccgcggtaagagaacagggaatcagcatccgggccacgatacgggctggacatcaggctgaccacgccgaacgcgccgaggctgctgaacagataaccggccaggtaaacccctaccgcttccatgctcatctcgccggtttgcagcgcaatcagcgctaccagcagatagccgaggtgagagatagaactgtaaccgagcagacgtttgatattggtctggctcagcgccatcaggttaccgaagatgatggaggcaaaggcgataatcgccagcaccacgcgaatcgcttcgctgtcacccaccggtgcgtagaggaacagacgcatcaccacaccgaagatagcgattttgctcgccgtcgccaggaaagtggaaaccggcgcaggcgcgccctggtatacgtctggcgtccacaggtggaacggcaccagagagagtttgaagccgaggccaacaatcatcaggccgaaacctgccagcaacagcggctcgttgagcataccgtcgccaaggtttttacccaacgcgacaaagctcaggtcgccagactgcgcatacaccagcgccataccaaacagcaggaaagaagacgctgcggcagaaaggatggtgtatttgatactggcttccagactacgtttctggcggaaagcgtaaccgaccaggccaaacagcggcaaagagatcagttcgataccgaggaacagagacgccagatggttggcattcgccagcaggatcccgcccagcgcggcaattaacaccaacaggtagaactcatccttgttgtcgttatagccttcaagccacgggtaggcgaaagtacaggtggcgaggctcgccaacaataccagcccggtgtaaagcatggcgaaaccatcaacgcgcatcagcggcgtaacgtccatagcgcccgcctggccaacaaaccagagcgaaaccagcgccgcgttaagcccaataaccgagagcgtagcgttgaggaaatgattgcgtcgccacgcaatggagagcatcacaaccaccaccgtcaagccgacgatcagcaacggtagcagtgcgatcaggttttgtggagttattgtcatggcgatttacggccttgtagtagtaacggaattaacaaaccactgctggatattgccaatcgcggagtggctggtatccagaatcggctgcggatagaagcccagcagtaccagcagcaccaccagcaacaggatcataaacagctcacgcaggctcatccctggcagttcctggctggcaatctggcttttcgctttaccgaagtaagcgcgatgtaacatcgccaggctataaacagatgcaaagaccagcccaaaggtagagataacggtaatcaccggtacaacctggaagctgccgaacagaatcataaattcgccgacgaagttaccggtgccaggcatcccaagcgttgccaccgcaaagaacaggctcagtgctggcagccatttcatcttgctccacagaccgcccatcatgcgcatgtcgcgggtatggatacgttcataaagctgaccacaaagaataaacagacccgccgcgctcaaaccgtgcgcaatcatctggattaccgcgccctggtaggccaactggctgccggtgtagatagcaatcagcacgaagcccatgtgggaaacgctggtgtaggcgatcagacgtttgatatcggtctgggcgaaggccatccacgcaccgtagaagatgccgataacacccagccacatagcaattggcgcgaactctgcgctcgcgttcgggaacagcggcagggagaaacgcagcaaaccgtaagcggcagttttcagcaagatccccgcgaggtcaacggaaccggcggtcggagcctgggagtgcgcatccggcagccagccatgcagcggaaccaccggcattttgactgcgaaggcgatgaagaagcccagcattaacaggtattccacaccactggacattggcgtattcagcagctcttcatagttgaaggtccagacgccggtcgcattgtagtgaacaaaaaccagcgccaggatggcaatcaacatcaccaggccactcgcctgggtgtaaatgaagaacttggttgccgccgtgatacgcgttttaccgtcagaggctttatgcccccacagtgcgatcaggaagtacatcggcaccagcatcatttcccagaagaagaagaacaggaacatgtcgatggcaaggaacacgccgataacgccgcccaggatccacatcaggttgaggtggaagaagccctgatatttttcgatctctttccagctacatagtaccgccagcacaccgagcagaccggtcagcacgaccatcagcaggctcagcccgtcaatggcgagatgaatagagataccaaaacgcgggatccacggcatgtcgaattcagactgccactgcggaattccggcggattgcgtcagactataaccgccctgcaaccacagttgcaggctcagcgccagcgtcaatcccatggtgatcagcgcgatccagcgtggcaccttgacgccaaagcgttcggtctgccagcacaggaagccgccaataaagggaattaatattagccagggtagtaacatggcgatctttattccttgtaaaagtcccgtcaggaccggattttcaacgaattctcacgacagaaaattctcttcggactgggggtagtgtcggatgcaccgcgaaggcggcttatccgacctacgttcttatatgcccaggggcaatcccacaatccttaactcaacgcagtaccatcaacagtgccagcaccacgaccgcaccgatgctcatggatgccacataccagcgcagatagccgttctcacttaacagcagacctttacctgcaaagcgggaaaggacagccgggatgttcatcatactgttcagcggatcgcgtttcagcaaccaggcaatacccaggaacggcttgacgaacactttgtcatacagccagtcaaatccccaggcgttgtaccaccaggtgcccagcagacggcccggcgcactgttggcgatggaggtcaccagagtacgtttacccagccacagccaggctgccagcagaatgccgaccaccgcgaccacgccagaggtaatttccagggtcaacatgctgccgtgcgccagttccgtcgtttgcggaagcacgccctgcagcggcggtacaatcagtgcgccaacgaaggtggaaaggatcagcagcacaatcagcggcaggctgtgagttacccctttcacggcgtgagcgtgaatttgttcttttccgtggaagacgatgaaaatcatacggaaggtgtagaggctggtcataaacgcaccgaccagacctgccaccatcagattgatatgaccattcgccatcgcacccgcgaggatctcatccttactgaagaagcccgcagtgaccagcggtagtgcgctcagtgctgcgccgcccaccaggaagcagagataaaccagcggaatagatttacgcagaccgcccatcttgaagatgttctgttcgtgatggcaggccagaatgacggaaccggatgccaggaacagcagcgctttaaagaacgcgtgggtcatcaagtggaaaatcgccgcatcccatgcctgcacgccaagcgcgaggaacatgtagccaatctggctcatggtagagtaagcgagaacacgtttgatgtcggtctgtaccagcgcggcaaaaccggccagcagcagcgtaaccgccccgacaatacccaccagatgcagaacttccggcgtcatcaggaacaggccgtgggtacgggcgatcaggtagacacccgcggttaccatggttgcggcgtggatcagcgcggagacaggcgtcgggcccgccatcgcgtcggcaagccatgtctgcaacggcaactgcgcagatttaccgaccgcaccgcccagcagcatcagcgtcgcccacatcagcatgttattgccgtcagcaaagtgcgctggtgccagttccaccatttcgcggaagttcagggtgcccagttcgttgtaaagaatgaacagtgcgaaagcgaggaacacgtcacccacacgggtcacgacgaacgctttcattgccgctgcgccattcttcggatcggtgtaatagaacccgatcagcagataggagcacaggcccacgccttcccagccgaggtacatcagcagcaggttgtcggcaagcaccagaaccaccatgctggcgatgaacaggttggtgtaagcgaagaagcgagagtagccctcttcaccgcgcatataccaggaggcgtacatgtgaataaggaaacccacaccagtgaccacgctgagcatggtcaggctcaggccgtccagcaccaggttaaaaccgatgttaaagtcgcctacgctcatccacgtccacagcggctggctgtatgtctgctcgccgttagcgaagaaatcaacgccgataaaggcggttaccagcgccgccaggcccacagagcctacgccgacgatcgcgctgacgttttcagaccagcgcccacgggagaatgccagcaggacgaagccaatcaatggcaaaataatggttaaggcaagcatgttcatccgcgcatctcacttacactatcgatgttcaggttctggcgacgacggtgaagttgcagcagcagcgcaaggccgatactcgcttctgccgccgcgaggctgatggcgagaatgtacatcacctgaccgtcggtctggccccagtagcttccggcgaccacgaaggccagcgcggaggcgttaatcatgatttccagaccaatcaacataaacagcagattgcgacggataaccagaccggttaagccaagaacgaataagattgccgcgaggatcagtccatgttgtaaggggatcatgcgtgctcctccgtttttcttttcgcgctgtcgtctttacgattgctcagcacttcacccgcacgctcttcacgaccgacgtggaaggccacaaccagacctgcgagcagcagcatagaagccagttccaccgccagtacgtaaggcccgaacagcgtaatacccactgctttagcactgattggcgtaccgtcgataccctgatcgttaacaccgaggatggcgtaaacaatcaccaccagcatgatggcgctcaaaattgccggaccaatccacacctgcggtttcagccactggcgttcctgttcgatttcactaccgcccaggttgagcatcatcaccacgaacacgaacagcaccataatggcacccgcgtagacgataatttccagcgcaccggcgaagtaagcgcccagactgaagaacaccccggaaatcgccagcaggctaataatcaggtacagcagtgcgtgtaccggattggtatgggtgatcactcgcaaggtcgcaagtatggctatcaggccacagatataaaaagcgaactccattgcccctctccttacggtaacaggctcttgacgtcgataggcttggcttcgttctctgcttcgcccttatctttgccgtcgattgccatacctgccatccggtagaagttatattccgggtatttgcccggaccggagatcagcagatcctctttctcgtaaaccagatcctggcgcttgtattcccccatttcgaaatccggggttaactgaatcgccgtggtcggacaggcttcttcgcacagaccacagaaaatgcagcgactgaagttgatgcggaaaaattccgggtaccagcgaccgtctttggtttctgctttttgcaggctgatacagccgaccgggcaggctaccgcgcagaggttacaggctacgcaacgctcttcgccgtccgggtcgcgggtcagaacgatacgaccacgataacggggcggcagatagaccggctcttccgggtacattcgcgtttcgcgtttggcgaacgcgtgcaggccgatcatccagatactacgaacctgggtgccgaaacctactaacaattcttttaaggtcatggtcttattgccccttattgcgcctgccagagaatgacagccgccgttaccagcaagttgatcagcgtcagcggcaggcagattttccagccgaaggacattacctggtcataacgcggacgcggtaagctcgcacgaatcaaaatgaacatcatcataaagaacgcggttttcagcgcgaaccagatgaatggcggtaacaacgggccttgccagccaccgaagaacagcgtcaccatcaatgcagagatggtcacaatcccgatgtactcacccacgaagaacagaccgaacttcataccggaatattcaatgtggtaaccatccgccagttcctgctcggcttccggctggtcaaacgggtgacggtgacataccgccacgcccgcgatggcaaaggtaataaaaccaaagaattgcgggataacgttccacacatgcgcctggctgttgacgatgtcggtcatgttgaaactaccggcctgcgccaccacgcccatcaaggaaagcccgaggaacacttcgtagctcagggtctgcgcagaagcacgcatcgcacccagcaagctgtatttgttgttactactccagcccgcaaacagcaccgcgtaaaccgccagacctgccatcatcaggaagaacaaaatcccgatgttcaggtcggcaaccacccaacccggactgactggcacaatcgcaaaggccagcagcaggctggtaaaggcaatcatcggtgccagggtaaagatgacgcgatcgctgaatttcgggatccagtcttctttaaagaacattttgatcatgtccgcaaccagctggaggctaccgccccagccaacacggttaggtccgtaacggttctggaacagacccagcaggcgacgttcgccaaagctcatgaatgccccgcaggtgacaaccaccagcaggatcaccaccgctttgaggatggtcagcaggatctcaatcagttccggacttatccaactcattgttgtgcctccttgagatcctcaagatgcgcgccagccagcaccggagcaatgccggacatacccatcggcaagcccacctgccctgccgtcagtccttcggcgatttcaaccggcagcgtgaccgtgttgccatcgtaactaaaggagacgcgtgtacctgcgttcacacccaacttcgcggcatccgctgggttgagtttgatgtacggctgcggcatacggctctggaagaccggagcacgctgactcaattcatcgctgccaaacaggtggtaatacggcgcgatacgccatttcccgtcctgcggctggaagcgtgccggtacgctggtgaagtaatccagaccattttcgctggtttcaaacagacgcacgcccggatcgccaaagcgcagtttgccgcccacttcgtcctggaatttgttccacgcctgcggggagttccagcccggcgcccaggcaaacggcacttggctacggtgcgcagtcggctggttgttaccttccatgctgaaggtgaacatggtgtcaatatcctgcggctgacgcggctcatgaacgctgatattggcgcgcatggcggtacgaccgctgtaacggtgcggttcacgggccagtttctgcccacgaatacggaatgtcgcatccggcgcagcatctttgatacctgccagttccgggattttcgccacaacagcgtcaatcacatggtcgagctgcgtccagtccacttcacggctcagcagggtgctgtgcaggctgtgtaaccagcgccagctttccagcatgacagttttgctgtcgtaataagcaggatcgtaaacctggaagaaacgttgggcgcggccttcgttgttgatcaccgtaccgtcgctttcagcaaagctggcagcagaaagtaccagatgggcgttttccataatcgctgtgcgttgatgatcaaccaccatcaccagcggtgctttagccagcgcagcattcacgcggatagcagaagcgtgacgatgcagatcgttttccaacaccaccaccgcgtcggcgcgtccggtttccagttcggttaacgcttcttcaaggctaccgccacccataatgcccagccccatgctgttgacggaacgggcaatcatggtgataccgacgtcagcgccgcgacctttcagggctttcgcgacgttagccgccgcctgaatcacctctaagctaccggcgttcgtcccggagataatcaacggtttcttcgcacctgccagtgcctgcacgatgacgtcgattttgctttgcagctcaggttcgataccgtcaaccgctggtgcagagttatccagcgcatgggcgatggcaaaacctaaacgcgcctgatcttcaaccggtgcgcggtaagtccacgccgcgatatcatccagacgggtgtcatcaacgttggtaacaaacagcggatgcttcgcacgttgaccgatgttgaggattgccgcaatctgccagtcagccactttctgtgctgccgccatttcgcgcgctttacctttcacagcctgacgcactgccagcgcgacgcgcgcgccggtctgggtaacgtcttcgcccagcaccagtaccgcatcgtaagattcgatttcgcgcagagccggagtataaatgccgccttcacgcagcactttcagcgccagttgcagacgttcctgctcaccgtgagcgataccggtgtagaagttttcttcgcccaccagttcacgcagcgcaaagttgctttccacgctggcacgcggagaaccaataccgatcactttcttgctctgacgcagaatatctgccgcgccctgcattgcctgttcggcgttgagggtaatgaaatcatcgccacgacgctgtactggctgacgcggacgatccttcaggttgacgtaaccgtaaccgaaacgaccacggtcgcagaggaagtagtggtttaccgtaccgttgtaacggttttcgatacgacgcagttcgccgtaacgttcaccggggctgatgttacagccgatggaacattgctggcagatgctcggcgcaaactgcatatcccatttacggttgtaacgctcggagtgcgttttgtcggtaaatacgccggtcgggcaaatttcgaccaggttaccggaaaattcgctttccagcgtgccgtcttccgggcgaccgaagtagacgttgtcgtgcgcaccgtaaacgcccagatctgtaccgtcagcgtaatctttgtagtaacgcacacagcggtagcaggcgatgcagcggttcatttcgtgagagatgaatggccccaaatcctgattacggtgggtacgtttggtgaaacggtagcgacggaagctgtgtccggtcatcacaatcatatcctgaagatggcagttaccgccctcttcacataccggacagtcgtgcgggtggttggtcatcaaccactcgaccacgctttcacggaactgtttcgcttcttcgtcgtcaatggaaataaaggtgccatcggaagccggtgtcatacaggacatcaccaggcgaccacgcgtgtcttccgcgttttggtattgcttcaccgcacactggcggcaagcaccgacacttcccagcgccggatgccagcaaaagtaaggaatatcaaggcccagagacagacaagcttccagcaggttgtccgctccgttgacctcgtattctttgccgtctacatgaattgtagccattagcatgcttccagttttctcagtcagagactgagcgttaatcgaaattcggttaccagcgctctttcagcaggttcggctgaatcccattaatcaaatgggtattgctgaacggctgtttgattcccgcctcaaattcttcgcggaaatatttgatggcgctctgtaacggctccactgcaccaggtgcgtgggcacagaaagttttacccgggcctaagaatcgacacagttgctcaagtgtttcgatatcgcccggctgaccttcaccacgctccagcgcacgcagaattttcacgctccacggcagaccgtcgcggcacggcgtacaccagccgcaggactcacgggcgaaaaactcttccaggttacgcaccaggctcaccatgttgatctcatggtcaaccgccatcgccagcgccgtacccagacggctgcccgctttaccgatactttcgaattccatcggcagatcaaggtgcgcttcggtcaggaagtcagtccccgcgccgcctggctgccaggctttaaatttcagaccatcacgcataccaccggcgtaatcttcgaggatctcgcgtgcggtggtgccgaacggcagttcccacagtcccggatttttcacccgaccggagaagcccatcagcttggtgccagcatctttacttttgctgatgttctgataccactccacgccgttagcgaggatcgccggaacgttacacagggtttcgacgttgttgacacaggtcggtttaccccatgcgccggaggttgccgggaagggtggcttgctgcgtgggttagcacgacgtccttccagggagttgattaacgctgtttcttccccgcagatgtagcgccctgccccggtatggacgaacagttcgaaatcgaaacctgttcccataatgtttttgccaagcagacccgcttcggtggcttcggcaatggcacggcgcagattaactgccgcttcgatatattcgccacgcaggaagatgtagccacggtaagctttcagcgcaaacgcggagatgagcataccttccaccagcaggtgcggcagttgctccatcaacaggcggtctttataggtgcccggctccatttcatcggcattacacagcaggtaacggatgttcatggattcgtctttcggcatcaggctccatttcaggccagtgctgaagcccgcgccgccgcgccctttcagaccagcgtcttttacctgattaacgatttcgtccggagacagcccggtcagcgccttacgcgcgccttcgtaaccgtttttgctgcggtattcgtccagccacactggctgtttgtcatcgcgcagacgccaggtcagcggatgcgtttcgggagtacggataatgtttttcatttataccgctccagcagttcagggatcgcttccggggtcagatgcgcgtgagtgtcctcatcgatcatcatgtttggccctttatcacagttccccaggcagcaagttggcagcagcgtaaagcggccatcaaatgtcgtttgccctggtttgatgttcagctttttctcgagcgccgcctgaataccctgataaccgttgatatgacagaccacgctgtcacaataacggatcacatggcgaccaaccggctggcggaagatctgactgtagaacgttgccacaccttcgacgtcgcttgccggaatacccagcacatcggcgatcgcgtggatcgcaccatccggcacccagccacgctgcttctgaacgattttcagcgcttcaatggacgccgcacgcgggtcttcgtagtggtgcatctcgtgctcgatcgcttcacgctctgccgcactcagctcaaaagcctcggtttgtggttgttgattctcgtgcataattagcggtccacatcactcataacaaaatcgatactgcccagataaacaatcaggtcagacaccaggctgccgcggatcgccgccggaatttgctgcaaatgcgcaaagctcggggtacgaacacgggtgcggtaactcatggtgctgccgtcgctggtcaggtagtaactgttgatccctttggtcgcctcaatcatctggaaagattcattggcaggcatcaccggaccccagctcacttgcaggaagtgggtgatcagggtttcgatatgttgcagcgtgcgctctttcggcggcggcgtggtcagcgggtgatccgctttgaacgggccttccggcatgttgttgaggcactgctcaagaatgcgcagactctggcgcagctcttccactttaagcattacgcgggtgtagcagtcagaaacgccaccacccaccgggatttcaaagtcgaagttttcatagccagaataaggacgcgccttacgcacgtcgaagtcgatcccggtagcacgcaggcccgcgccagtggtgccccactccagcgcctctttcgcgccataggcggcaacgccctgggaacgacctttcagaatggtgttttgcagcgccgctttctcgtaagacgccagacgtttcggcatccagtcgaggaactcacgcagcaggcgatcccagccgcgcggcaggtcgtgcgctacgccgccaatacggaaccacgccgggtgcatacggaaaccagtgattgcttccaccagatcgtaaattttctgacgatcggtaaaggcgaagaacactggcgtcattgcgccgacgtcctgaataaaggtgctgatatacagcaggtgactgttgatgcggaacagttcggagagcataacgcgaatgacgttaacgcgatccggcacggtgatcccggccagtttctctaccgccagcacgtaaggcatttcgttaacgcagccgccgaggtattcgatacggtcagtatacggaatgtagctgtgccaggactggcgttcgcccattttctccgcaccacggtggtggtaaccgatgtctggtacgcagtcgacaatctcttcgccatcgagttgcaaaacgatacggaaagccccgtgcgcgctcgggtggttcggaccgaggttgaggaacatgaagtcctcgttttcggtgccgcgcttcatcccccactcttccggtttgaaggtcagggcttccatctccagatcctgtttggctttggtcagctcaaacgggctgaattcggtagcgcgcgccggataatctttacgcagcgggtgacctttccaggtttgcggcatcatgatgcgtcgcaggttcgggtgaccgtcgaaagtaatgccaaacagatcccaggtttcacgctcataccagttagcgttcgggaacagtttggtgaaggtcggtacgtgcaggtcgttttctgccagcgccaccttcagcatgatgtcgcggttacgatcgatagaaatcagatggtagaaaacggaaaaatccgcggcaggtaacccttcgcggtgtgtgcgcagacgttcgtccatgccgtgtaagtcaaacagcatgacgtaaggtttcggcagtttctttaagaaatcgccaacttccagtaattgttcacgcttgatccacacaacgggaaccccggtgcgagtcgcctgaacagtaaaggcatccggcccaaaacggttgcgcagttcgccaatcaccggatcatcaagatgatcgcgggtctgccaggcgggttcttgcgcggttaagtcggtcatattgttcaccattgcaaatggtccgtggtgactgtcggcgcagtaagcttcgcgaaatagatttaggaataagcgaagaaaaatccctttgccgacaggcgcaaattaaatctcgtcaggtgtacgcaggttagttacggcaatgcgttcaccgcgcttgcgttcgcgctcactttgcatattggcgcgataaacgccctgatcgccaaccacccaggagagcggacgacgttctttgccgatagattcctgcaacagcatcagtgcctgcatgtacgcttcaggacgcggcgggcagcccgggatatacacatcaaccgggatgaatttatcgacgccctgcacaacggaataaatatcgtacataccaccagagttggcacaggcacccatactgataacccattttggttccagcatctggtcatacagacgctgaataaccggtgccattttggtaaagcaggttcctgcaaccaccatcaggtcagcctgacgcgggctagcacgcaatacttctgcgccaaaacgcgccacgtcatgcaccgcggtaaagctagtcaccatctcaacgtaacagcaggaaagaccgaagttatacggccaaatactgtttttacgaccccagttaaccatgtcattgagcttgcccataaacacgtttttgttaacttcttgctccagagggtcggttacgatctcctgcttttgcagggggtaacggtcgttctcaccgttgggatctatgcgggtgagcgtataatccatcttaatgcctcgcggttagcgttgacgattagcgatactgttcgtttccgggttcatacgctcgcggcgactacgcgcgggcgtccagtccagcgcgccaatacgcaccagataaaccagacctgccagtaacacaaaaataaaaattgcagcttccacaaagcctacccagccgctttcgcggatagaggtactccatgcgaacagatacagcgcttcaacgtcgaagataacgaagaacatggccaccagataaaacttggcggacaggcgtaagcgggcggagccgacgctgtcgataccggattcaaacggcacgtttttgctcctcgcgcgtgcgcgaccgcctaaaaaccaaccgcctaccagcatcaggcaacacaggccaatggcaacgataagaaagatagcgaatgcccagtgatgagcgatgacttcagtggatgtactcatactcattgcttactcatcaaaagtagcgccagattcactgctcttcacggcagatggacgccacatcgattcatggggaggaataaaaaaaaccttacaatcactgtagaaattcttttatacagctaattgatgtggttttttactcctttctataaccttttgtcaactttaacaaaagtttcttcacattagtttacataatatcaacaccattagcatttaatgccctttcaccccagatccttgacgactccaggataattagatgttgttgaatcgtgtccgttgtgaagcaatggaaaaaatacgggtctattttgacaggaatttgtgtcgattcctccccccaaaagagagtattttcttgatctgtgacacgcttttgtcattccataacaaaaacgcagcaacaaatttacgtattttttaacatcattgtagcaggtgatttttttcaggcgattatttgtgcgttcgggacgtgaatctctggtggttgaaaaatgaacagttttgtacgttctgcactatgcgatgaaggatttttactaaaaaaaagccgctggggtttaaaacacccccagcggctcgttttttacactattgtctcaggaattatctatcgtccgtcgattactcgatatccctttcaatcaacaaactatcatccccttccggagcagacattgggctgtattgccacggattatggtagctctccatcgcctgatagatcacctgggccagctcattattactggacggatcatagcacagcaaatattcggtatcaggtagcggcggtaagccatctactccactcagcacacgcaggtccgggctcatcatctcaaccggccttgccgtcacgccaagaccggctttcactgccgcacgaacggccggaagcgtgctggcgacataagccagtcgccatggaatatctgctttattaagcgtcgccagcaccatatcgcgaaacgggctaggatcatccagcaatacaagagggatcggctcgcctttttgcaatatgtattccgctgcgcagtaccagtgtgttgggctggtacgcaggttcaatgccttaaacgcactaggacgatgggtggttaccatcaaatccacttcctgggattccagcatttctgccatataggcattacgtttaacgcggacatccagcgctaatttcggataaacgctactcacgcgatttaacaggaaaggtaagatcgtatcggcagattcatcactagcaccgatagttaatacgccctgaagattactgaacattaaactactgcaggcctcatcattaaaacgcaggattttcctggcgtaaccaagaagttgaatgccatgttcagttaacagtttgttgcgaccgtgacgagcgaacagttctttcccaacgagttgttccagacgctgcatttgctgacttacggcggactgagtacgacacacagcggcagctgcggcagcaaaagtgttcagatcggcaacagcaacaaatgttctcagcagatcgaggtcgaggttaattatcggacgatttgcacttatcatatattatcacttactggcggctcatactgagctggttaatgctgtgcacacacaaacaagcaattccatttgtaatgtgcctccctggcagtttcatccggaacccggacgaaagtaaaaatgcatatgagttgcactaaaaaagcgactcacattgttccgttataatgcctgaagtagatcacagaatatatcttcagggatcgcatatctattaagttactcactcttttctatttatgacatgcgcgtgtttgtataaatgtaaatgtgagtccttgttccactctcgtgcagcatcgctggtcatacgcgaacacgtaccaacagcaatggtgaggcggcatcaagagcagggatccgtcatttatccgagcattttaccccaaaaaccttttatttataagggtcattgcgaattatctgatgcaaagttatgttatgttaggcaaagtaatcttctattattaataagcacatcaaaacctttttgaatattaaataataattaattagcatcatcctcattcattaattccgcttaacaatagtttcacaccttgcccccattgcgacacctcggaaatcatcacgcagttaaactctccgtaatgaggaaatatcatcatcgcgtttcattagtgaattcttaaatgaggcattttcacacaattatcttacagataaaaaaaccagacttacaattaagaatcagaacaattcactatataacattgcatgtaaagcatatacacctcattattttgtcattattaagttattaacagcacaatcgagccttcccctctggcaaaatcttattctgcagaccttcaaaacaccgtcctgggggagtacattgttctaagctgacttccacggcagggagtggcgataacagcaaaaaaggtcaagattcatgtcccccattgaaaaatccagcaaattagagaatgtctgttatgacatccgtggtccggtgctgaaagaagcaaaacgcctggaagaagaaggtaacaaggtactgaaactgaacatcggcaacccagccccgttcggttttgacgcgccagatgaaatcctcgttgacgtgatacgcaacctgcctaccgctcaagggtattgcgattccaaaggtctttactccgcgcgtaaagccatcatgcagcactaccaggctcgtggcatgcgtgatgttaccgtggaagatatttacatcggcaatggtgtaagcgagcttatcgttcaggcaatgcaggcattgctgaacagcggggacgaaatgttggttcctgcaccagattacccactctggaccgcggcggttagcctttccagcggtaaagcggtgcattatctttgcgatgaatcctctgactggttcccggacctcgatgatattcgcgctaaaattacgcctcgtacgcgtgggatcgttattatcaacccaaataacccaaccggcgcggtatattccaaagagcttttaatggagattgtggagattgcacgtcagcataatctcattatcttcgccgatgaaatttatgacaaaattctctacgacgacgctgagcatcacagtattgcgccgctggcacctgacctgctgaccattacctttaacggactgagcaaaacgtaccgcgttgcaggcttccgtcaggggtggatggtgttgaacgggccgaaaaaacacgccaaaggctacatcgaaggtctggaaatgctggctagtatgcgcctgtgtgctaacgttcctgcgcaacacgccattcagaccgcgctaggtggttatcagagcatcagtgaatttattacccctggcggtcgtctttatgagcagcgtaaccgcgcgtgggaactgatcaacgatattccgggcgtttcctgcgtgaaacctcgtggtgcgctgtatatgttcccgaaaatcgacgccaaacgctttaacattcacgacgatcagaaaatggtgttggatttcctgttgcaggaaaaagttctgttggtgcaagggacggcattcaactggccgtggccggatcacttccgcattgtcacgctaccgcgtgtcgatgatatcgagctgtctttgagcaagttcgcgcgtttcctttctggttatcatcagctgtaatcttaatttcactgccggagattgcatccggcagcgttatcccgccacaatgacctgatgatgtcatcatacgtaaggtcactatgaaacagagccatttttttgcccatctctcccgcctgaaactcattaaccgctggccgctcatgcgcaacgtgcggacggaaaatgtgtccgaacacagtttgcaggtagcgatggtcgcccatgcgctggcagctatcaaaaatcgaaaatttggcggtaatgtcaacgccgaacgtatcgctttactggcgatgtaccacgatgccagtgaagtgctcaccggcgatctccctactccggtgaaatacttcaatagccaaatcgctcaggagtacaaggctattgaaaaaatcgctcagcaaaaactggtcgatatggttccggaagagctgcgggatatctttgcgccgttaattgacgagcatgcatatagcgatgaagaaaaaagcctggtgaaacaggcagatgcactgtgtgcatatctgaaatgtctggaagaactcgcggccggaaataatgaattcttgctggcaaaaacgcgactggaagcgacgcttgaagcgcgtcgcagccaggagatggactacttcatggaaatatttgttcccagcttccatcttagcctcgatgagattagccaggatagtccgctgtaagcagccggagtctgcgtcgcatcaggcaataagcgccggatgcgacatcaggctcttgtcaaaacggaaacagcatcgggatcatcaccacacaaaccgccatcacgataatggtgaacggtacccccaacttcacaaagtcactgaagctgtaatttcccggacctaaaaccagtgtgttaacaggactagaaaccggtgtcataaaggcggcggatgctgccatcgccacgaccatcgcgaatggataagggctcacccccatcgttttggcagcagccagcgcaatcggagccatcaacaccgccgtcgcggtattagagataaatagcccaataaccgcgctcaagacaaacaaacaccccagcatcatatgtggcccgtaaccaccgccaatgtccatcagccctttcaccgccagcgcgacacctcccgttttctgtaatgccacagcaaacggcatcatcccaacgatcaaaataatgctcggccagtgaatggatttataggcgctttcagcatctatacagcggaatttccccatcagcaggcaggcgatgatagcggcaacaggattaggaatttcatctgtcagcattaacgccaccattagcaccagacagaaaatggcatggggtgcctggctgtgcgcgggacttgcttcactcacctcttccggtaagttcagcgctacgaagtcgcggccctgtttggccagcataccgatcagtttccagttacccacaaccaggatgatatcgcccagcagcagaggctcatccgccaggctaccttccagcgccacgccattgcgctttagccccaccacattcagtccgtagcgggtacgaaaaccaatttcgcgcacgcttttaccaatcagttcactctcaggaattaaactaatctctgccatgcccacatcaagggcctggtcagaaaaatactcgccgcgcagtaccatcggctccagcaattgctcactacaaaattgccggagatcgacatcagccgcagacatatcaataagcaaaacgtcacgcgcgcgaaattcagaaaccccattaacgttcacgataacgcgacgaaaacgccgccagcgttcaacaccgatgacgttagcgccataacgctcacgtaatttgagatcatccagccgttgaccaatcattgggcttccggggcgaatagccagacgtcgcgcacgcccggtcagtcgatattcacggataagatcgcgaaaggttcgacgcgtccagccttcgcgctgcggggtctgggtatcccctttcagcatgaaacgcatcactaacatatacaaaatacccagcaccagcacgaccaggccaataggtgttacgctaaagaaactgaagccgtgatagccttcacgcagcaattcactgttgactaccaggttcggcggcgtcgccaccagcgtcatcatgccgctaatcagcccggcaaaacttaacggcatcatcagacgactcgggctcgtttgcatacgcatggcaacgcttaacaccacgggaataaagatagcgacaacgccggtactactcataaacgcgccaagccccgcgacggtcagcatcaacaaaaccaacattttgatttcactattgcccgcaactttgaccagccatgttcccattacggtggcaacaccggtacggaccaaaccatcgccaataataaacaaggcggcaatcaggacaacgttaggatcagaaaagccggaaaatacttctgggactgtcagcgttccgcttaatgcaaacgcgacaataacaaacaaagcgaccgcatccatacgcactctgcccgtcgcaaacaagacgatggcaacggccagtaaactaagaacccaaatcaattcaccgttcacaacttatccttgttaattgagggggatgacttgattctgccataaaaaagccccgacgagacggggctaaatcatgatcaggtgtttcactgaataataacatcgccatttggctgtttggtcacagtaatttgctccagactgtggaggaccaaatcgacctcattcaggcgcggggtatctgccggagcgttaaccgcaatgacatgacaacccgccgccaggccagaaagcacgccagcgggagcatcttccaccaccacacactcctgcggcgcaagccccagcagctgcgcgcctaacagatacgcatcaggttctggttttccgcgcttcactcgctcagcggttacaaacacctctggtgcgggaagcccagctattttatggcgcgctcgcgctaccggcatggagccagaagtcacaatggcccacggaatacctgctttattcaaatgactgagtaaggcgattgcccccggaagcgcggtaataccttcggtttccgtggcctcgatgtgctccagacgcgtaaactcggcggcaatatcagcctcggatttgcccgccataaaatggcgcagagaggtgatcgcctgtttaccgtgaatgaaagccagcacctcttccggcgctaacccatgacgtctggcccagttgctccacgcccgttctaccgcaggcagggaatccaccagcgttccatcaagatcaaacagaaaacctttgcaccgcacgcgggcctcctcaggcattgataatttgattaatttcgttggcgctcaaatggtactgacgcgggcaggcatgccacacattaagcatgcgctgatatttttcccacattggcgtctgggcgttaaaaccgtgagttccggcgtcaaaatgggtatagcgcccttccacattaaccataaagcggacataaccgaggtaacgtgcttcagtggcggcgtcaaagccgaggaaggtgacacgacgttcatcgatggattgctggtcctgcaaattagaccaggaaacatgcaacgcatgatacatctccataatgtcgatgatagtgcggcaggtttcttctttcagctcgccaaactcgcgatccaattcacgcatctgtaatccgtaaccacgctcaataattgtttgcaggcgacggtaacgttcagcatttgccggatcgagcatagtcatcatcttgtactgattagacaaaataagacgttgcgcgttggtcatttccattgttgactcctgtatcactctactacggtgaaaaaaaagaaggctgagtatgccttcttttatatgcgtaatcaggggtcaattacaaatcatcaaggaaagttttatccagttgtttgaaggcgcgcttaagcgtgtcagctaatgcctggtaatcaggcttgccttcaacgggtgccaacacctgtccagactcctgcaatttaccgcgaacttcataaaaccagttaaggattgcagggggtaatggcgtgacagaacgcttgcccagccaccacaatccctgcatgggtaaacttaaggcgaacagggcagtggcaactgccggcccaagctgaccgcccagggcaatctgccagcagagagtaaatacggcgatcggcggcataaaacggatcgcataacgcgtcatcttgataacgcgattttcgacaaagaccggggcaaggcgtttttccagcggccacgtcttactgtaatgctgtccccggcgaaacaagctaaaaaaattaacagaacgattatccggcgtactcatgcttcacctcaacttcacatataaagattcaaaaatttgtgcaaattcacaactcagcgggacaacgttcaaaacattttgtcttccatacccactatcaggtatcctttagcagcctgaaggcctaagtagtacatattcattgagtcgtcaaattcatatacattatgccattggctgaaaattacgcaaaatggcatagactcaagatatttcttccatcatgcaaaaaaaatttgcagtgcatgatgttaatcataaatgtcggtgtcatcatgcgctacgctctatggctccctgacgtttttttagccacgtatcaattataggtacttccatgagcagtaagttagtactggttctgaactgcggtagttctagtctgaaatttgccatcatcgatgcagtaaatggtgaagagtacctttctggtttagccgaatgtttccacctgcccgaagcacgtatcaaatggaaaatggacggcaataaacaggaagcggctttaggtgcaggcgccgctcacagcgaagcgctcaactttatcgttaatactattctggcacaaaaaccagaactgtctgcgcagctgactgctatcggtcaccgtatcgtacacggcggcgaaaagtataccagctccgtagtgatcgatgagtctgttattcagggtatcaaagatgcagcttcttttgcaccgctgcacaacccggctcacctgatcggtatcgaagaagctctgaaatctttcccacagctgaaagacaaaaacgttgctgtatttgacaccgcgttccaccagactatgccggaagagtcttacctctacgccctgccttacaacctgtacaaagagcacggcatccgtcgttacggcgcgcacggcaccagccacttctatgtaacccaggaagcggcaaaaatgctgaacaaaccggtagaagaactgaacatcatcacctgccacctgggcaacggtggttccgtttctgctatccgcaacggtaaatgcgttgacacctctatgggcctgaccccgctggaaggtctggtcatgggtacccgttctggtgatatcgatccggcgatcatcttccacctgcacgacaccctgggcatgagcgttgacgcaatcaacaaactgctgaccaaagagtctggcctgctgggtctgaccgaagtgaccagcgactgccgctatgttgaagacaactacgcgacgaaagaagacgcgaagcgcgcaatggacgtttactgccaccgcctggcgaaatacatcggtgcctacactgcgctgatggatggtcgtctggacgctgttgtattcactggtggtatcggtgaaaatgccgcaatggttcgtgaactgtctctgggcaaactgggcgtgctgggctttgaagttgatcatgaacgcaacctggctgcacgtttcggcaaatctggtttcatcaacaaagaaggtacccgtcctgcggtggttatcccaaccaacgaagaactggttatcgcgcaagacgcgagccgcctgactgcctgatttcacaccgccagctcagctggcggtgctgttttgtaacccgccaaatcggcggtaacgaaagaggataaaccgtgtcccgtattattatgctgatccctaccggaaccagcgtcggtctgaccagcgtcagccttggcgtgatccgtgcaatggaacgcaaaggcgttcgtctgagcgttttcaaacctatcgctcagccgcgtaccggtggcgatgcgcccgatcagactacgactatcgtgcgtgcgaactcttccaccacgacggccgctgaaccgctgaaaatgagctacgttgaaggtctgctttccagcaatcagaaagatgtgctgatggaagagatcgtcgcaaactaccacgctaacaccaaagacgctgaagtcgttctggttgaaggtctggtcccgacacgtaagcaccagtttgcccagtctctgaactacgaaatcgctaaaacgctgaatgcggaaatcgtcttcgttatgtctcagggcactgacaccccggaacagctgaaagagcgtatcgaactgacccgcaacagcttcggcggtgccaaaaacaccaacatcaccggcgttatcgttaacaaactgaacgcaccggttgatgaacagggtcgtactcgcccggatctgtccgagattttcgacgactcttccaaagctaaagtaaacaatgttgatccggcgaagctgcaagaatccagcccgctgccggttctcggcgctgtgccgtggagctttgacctgatcgcgactcgtgcgatcgatatggctcgccacctgaatgcgaccatcatcaacgaaggcgacatcaatactcgccgcgttaaatccgtcactttctgcgcacgcagcattccgcacatgctggagcacttccgtgccggttctctgctggtgacttccgcagaccgtcctgacgtgctggtggccgcttgcctggcagccatgaacggcgtagaaatcggtgccctgctgctgactggcggttacgaaatggacgcgcgcatttctaaactgtgcgaacgtgctttcgctaccggcctgccggtatttatggtgaacaccaacacctggcagacctctctgagcctgcagagcttcaacctggaagttccggttgacgatcacgaacgtatcgagaaagttcaggaatacgttgctaactacatcaacgctgactggatcgaatctctgactgccacttctgagcgcagccgtcgtctgtctccgcctgcgttccgttatcagctgactgaacttgcgcgcaaagcgggcaaacgtatcgtactgccggaaggtgacgaaccgcgtaccgttaaagcagccgctatctgtgctgaacgtggtatcgcaacttgcgtactgctgggtaatccggcagagatcaaccgtgttgcagcgtctcagggtgtagaactgggtgcagggattgaaatcgttgatccagaagtggttcgcgaaagctatgttggtcgtctggtcgaactgcgtaagaacaaaggcatgaccgaaaccgttgcccgcgaacagctggaagacaacgtggtgctcggtacgctgatgctggaacaggatgaagttgatggtctggtttccggtgctgttcacactaccgcaaacaccatccgtccgccgctgcagctgatcaaaactgcaccgggcagctccctggtatcttccgtgttcttcatgctgctgccggaacaggtttacgtttacggtgactgtgcgatcaacccggatccgaccgctgaacagctggcagaaatcgcgattcagtccgctgattccgctgcggccttcggtatcgaaccgcgcgttgctatgctctcctactccaccggtacttctggtgcaggtagcgacgtagaaaaagttcgcgaagcaactcgtctggcgcaggaaaaacgtcctgacctgatgatcgacggtccgctgcagtacgacgctgcggtaatggctgacgttgcgaaatccaaagcgccgaactctccggttgcaggtcgcgctaccgtgttcatcttcccggatctgaacaccggtaacaccacctacaaagcggtacagcgttctgccgacctgatctccatcgggccgatgctgcagggtatgcgcaagccggttaacgacctgtcccgtggcgcactggttgacgatatcgtctacaccatcgcgctgactgcgattcagtctgcacagcagcagtaatctcgtcatcatccgcagctttgcgctgcggatatctgaaccggaaataatcactatttccggttttttattctcttaatttgcattaatcctttctgattatcttgcttaactgcgctgcatcaatgaattgcgccatcccactttgcatacttaccactttgttttgtgcaagggaatatttgcgctatgtccgcaatcactgaatccaaaccaacaagaagatgggcaatgcccgatacgttggtgattatcttttttgttgctattttaaccagccttgccacctgggtagttccggtggggatgtttgacagtcaggaagtgcagtatcaggttgatggtcaaacaaaaacacgcaaagtcgtagatccacacagttttcgcattctgactaacgaagcaggcgaacctgagtatcaccgcgtacagctgttcacgacgggcgatgaacgcccgggcctgatgaacttcccgtttgaaggattaaccagtggaagcaaatacgggacagccgttggcatcatcatgtttatgctggtgattggcggcgcgtttggcattgtgatgcgtacaggaaccattgataacggtatcctggcgcttattc

(The sequence listing continues in the following parts.)

1. A prokaryotic cell, wherein:
the prokaryotic cell does not express a first endogenous tRNA and a second endogenous tRNA; and
the prokaryotic cell comprises a genome wherein a first type of sense codon and a second type of sense codon have been recoded such that the first endogenous tRNA and the second endogenous tRNA are dispensable.

2. The prokaryotic cell of claim 1, wherein:
the essential genes of the genome do not contain occurrences of the first type of sense codon, and the first endogenous tRNA is a cognate tRNA for the first type of sense codon; and/or
the essential genes of the genome do not contain occurrences of the second type of sense codon, and the second endogenous tRNA is a cognate tRNA for the second type of sense codon.

3. The prokaryotic cell of claim 1 or claim 2, wherein:
the genome comprises 5, 4, 3, 2, 1, or no occurrences of the first type of sense codon, and the first endogenous tRNA is a cognate tRNA for the first type of sense codon; and/or
the genome of comprises 5, 4, 3, 2, 1, or no occurrences of the second type of sense codon, and the second endogenous tRNA is a cognate tRNA for the second type of sense codon.

4. The prokaryotic cell of any one of claims 1 to 3, wherein
the first type of sense codon is TCA and the first endogenous tRNA is tRNA^{Ser}_{UGA}; and/or
the second type of sense codon is TCG and the second endogenous is tRNA^{Ser}_{CGA}.

5. The prokaryotic cell of claim 4, wherein
a plurality of occurrences of the TCA codon in the parental strain have been replaced with AGT; and/or
a plurality of occurrences of the TCG codon in the parental strain have been replaced with AGC.

6. The prokaryotic cell of any one of claims 1 to 5, wherein:
the prokaryotic cell does not express a first endogenous release factor; and
a first type of stop codon has been recoded within the genome such that the first endogenous release factor is dispensable.

7. The prokaryotic cell of claim 6, wherein the essential genes of the genome do not contain occurrences of the first type of stop codon, and the first endogenous release factor is a cognate release factor for the first type of stop codon.

8. The prokaryotic cell of claim 6 or claim 7, wherein the genome comprises 5, 4, 3, 2, 1, or no occurrences of the first type of stop codon, and the first endogenous release factor is a cognate release factor for the first type of stop codon.

9. The prokaryotic cell of any one of claims 6 to 8, wherein the first type of stop codon is TAG and wherein the first endogenous release factor is RF-1.

10. The prokaryotic cell of claim 9, wherein occurrences of the TAG codon in the parental strain have been replaced with TAA.

11. A prokaryotic cell comprising a genome that is at least 80%, 85%, 90%, 95%, 98%, 99%, 99.5%, 99.8%, 99.9%, or 100% identical to any one of SEQ ID NOs: 3 to 8.

12. The prokaryotic cell of any one of claims 6 to 11, wherein
the prokaryotic cell expresses a third orthogonal aminoacyl-tRNA synthetase and a third orthogonal tRNA,
the third orthogonal aminoacyl-tRNA synthetase and the third orthogonal tRNA form a third orthogonal aminoacyl-tRNA synthetase-tRNA pair, and
the third orthogonal tRNA is capable of decoding the first type of stop codon.

13. The prokaryotic cell of claim 12, wherein the third orthogonal aminoacyl-tRNA synthetase-tRNA pair is:
AfTyrRS or a variant with altered selectivity to a non-canonical amino acid, and Af-tRNA^{Tyr(A01)}_{YYY}; or
MjTyrRS or a variant with altered selectivity to a non-canonical amino acid, and MjtRNA^{Tyr}_{YYY}.

14. The prokaryotic cell of any one of claims 1 to 13, wherein
the prokaryotic cell expresses a first orthogonal aminoacyl-tRNA synthetase and a first orthogonal tRNA,
the first orthogonal aminoacyl-tRNA synthetase and the first orthogonal tRNA form a first orthogonal aminoacyl-tRNA synthetase-tRNA pair, and
the first orthogonal tRNA is capable of decoding the first type of sense codon.

15. The prokaryotic cell of claim 14, wherein the first orthogonal aminoacyl-tRNA synthetase is MmPylRS or a variant with altered selectivity to a non-canonical amino acid, and the first orthogonal tRNA is MmtRNA^{Pyl}_{YYY} or MmtRNA^{Pyl}_{UGA}.

16. The prokaryotic cell of any one of claims 1 to 15, wherein
the prokaryotic cell expresses a second orthogonal aminoacyl-tRNA synthetase and a second tRNA,
the second orthogonal aminoacyl-tRNA synthetase and the second orthogonal tRNA form a second orthogonal aminoacyl-tRNA synthetase-tRNA pair, and
the second orthogonal tRNA is capable of decoding the second type of sense codon.

17. The prokaryotic cell of claim 16, wherein the second orthogonal aminoacyl-tRNA synthetase is 1R26PylRS or a variant with altered selectivity to a non-canonical amino acid, and the second orthogonal tRNA is AlvtRNA^{ΔNPyl(8)}_{YYY} or AlvtRNA^{ΔNPyl(8)}_{CGA}.

18. The prokaryotic cell of any one of claims 1 to 17, wherein the growth rate of the prokaryotic cell is faster than the growth rate of a reference prokaryotic cell of a parental strain.

19. The prokaryotic cell of claim 18, wherein the reference prokaryotic cell is of a parental strain directly obtained upon recoding of the genome to remove the first type of sense codon, the second type of sense codon, and the first type of stop codon.

20. The prokaryotic cell of claim 18, wherein the reference prokaryotic cell is of a parental strain directly obtained upon removal of the first endogenous tRNA, the second endogenous tRNA, and the first endogenous release factor.

21. The prokaryotic cell of any one of claims 1 to 20, wherein the prokaryotic cell is resistant to phage infection and/or horizontal transfer of the F plasmid.

22. The prokaryotic cell of any one of claims 1 to 20, wherein the prokaryotic cell is completely resistant to phage infection and/or horizontal transfer of the F plasmid.

23. The prokaryotic cell of any one of claims 1 to 22, wherein the prokaryotic cell is a bacterial cell or an Escherichia coli cell.

24. The prokaryotic cell of any one of claims 1 to 23, wherein the prokaryotic cell is viable.

25. A method for producing a modified prokaryotic cell, wherein the method comprises:
(i) modifying a prokaryotic cell to express a first orthogonal aminoacyl-tRNA synthetase-tRNA pair suitable for decoding a first type of sense codon, wherein
the prokaryotic cell comprises a genome wherein the first type of sense codon has been recoded such that a first endogenous tRNA is dispensable;
(ii) incubating the prokaryotic cell in the presence of a non-canonical amino acid which is a substrate for the first orthogonal aminoacyl-tRNA synthetase; and
(iii) modifying the endogenous gene encoding the first endogenous tRNA such that the first endogenous tRNA is not expressed.

26. The method of claim 25, wherein steps (i) and (ii) are performed before step (iii).

27. The method of claim 25 or claim 26, wherein the method further comprises:
(a) modifying the prokaryotic cell to express a second orthogonal aminoacyl-tRNA synthetase-tRNA pair suitable for decoding a second type of sense codon, wherein
the prokaryotic cell comprises a genome wherein the second type of sense codon has been recoded such that a second endogenous tRNA is dispensable;
(b) incubating the prokaryotic cell in the presence of a non-canonical amino acid which is a substrate for the second orthogonal aminoacyl-tRNA synthetase; and
(c) modifying the endogenous gene encoding the second endogenous tRNA such that the second endogenous tRNA is not expressed.

28. The method of claim 27, wherein steps (i) and (ii) are performed before step (iii), and/or wherein steps (a) and (b) are performed before step (c).

29. The method of claim 27 or 28, wherein
steps (a), (b), and (c) are performed before steps (i), (ii), (iii); or
step (a) is performed concurrently with step (i), step (b) is performed concurrently with step (ii), and step (c) is performed concurrently with step (iii); or
steps (a), (b), and (c) are performed after steps (i), (ii), (iii).

30. The method of any one of claims 25 to 29, wherein the essential genes of the genome do not contain occurrences of the first type of sense codon, or the genome comprises 5, 4, 3, 2, 1, or no occurrences of the first type of sense codon.

31. The method of any one of claims 25 to 30, wherein the first type of sense codon is TCA and the first endogenous tRNA is tRNA^{Ser}_{UGA}.

32. The method of claim 31, wherein the TCA codon has been replaced with AGT.

33. The method of any one of claims 25 to 32, wherein the first orthogonal aminoacyl-tRNA synthetase is MmPylRS or a variant with altered selectivity to a non-canonical amino acid, and the first orthogonal tRNA is MmtRNA^{Pyl}_{YYY} or MmtRNA^{Pyl}_{UGA}.

34. The method of any one of claims 25 to 33, wherein the essential genes of the genome do not contain occurrences of the second type of sense codon, or the genome of comprises 5, 4, 3, 2, 1, or no occurrences of the second type of sense codon.

35. The method of any one of claims 25 to 34, wherein the second type of sense codon is TCG and the second endogenous tRNA is tRNA^{Ser}_{CGA}.

36. The method of claim 35, wherein the TCG codon is replaced with AGC.

37. The method of any one of claims 25 to 36, wherein the second orthogonal aminoacyl-tRNA synthetase is 1R26PylRS or a variant with altered selectivity to a non-canonical amino acid, and the second orthogonal tRNA is AlvtRNA^{ΔNPyl(8)}_{YYY} or AlvtRNA^{ΔNPyl(8)}_{CGA}.

38. The method of any one of claims 25 to 37, wherein the genome of the prokaryotic cell to which the method is applied is at least 80%, 85%, 90%, 95%, 98%, 99%, 99.5%, 99.8%, 99.9%, or 100% identical to any one of: GenBank accession number CP040347.1, SEQ ID NO: 3, or SEQ ID NO: 4.

39. The method of any one of claims 25 to 38, further comprising
modifying the prokaryotic cell to express a third orthogonal aminoacyl-tRNA synthetase-tRNA pair suitable for decoding a first type of stop codon, wherein a first type of stop codon has been recoded within the genome such that a first endogenous release factor is dispensable.

40. The method of claim 39, wherein the essential genes of the genome do not contain occurrences of the first type of stop codon or the genome comprises 5, 4, 3, 2, 1, or no occurrences of the first type of stop codon.

41. The method of claim 39 or 40, wherein the first type of stop codon is TAG and wherein the cognate release factor for the first type of stop codon is RF-1.

42. The method of claim 41, wherein the TAG codon is replaced with TAA.

43. The method of any one of claims 39 to 42, wherein the third orthogonal aminoacyl-tRNA synthetase-tRNA pair is:
AfTyrRS or a variant with altered selectivity to a non-canonical amino acid, and Af-tRNA^{Tyr(A01)}_{YYY}; or
MjTyrRS or a variant with altered selectivity to a non-canonical amino acid, and MjtRNA^{Tyr}_{YYY}.

44. The method of any one of claims 25 to 43, comprising, prior to step (i) and (a):
inducing mutagenesis in a cell culture comprising the prokaryotic cell that comprises the recoded genome,
maintaining the cell culture under exponential growth conditions,
selecting a prokaryotic cell, from said cell culture, with an increased growth rate compared to the initial culture; and
wherein step (i) or (a) is applied to the selected prokaryotic cell.

45. The method of claim 44, wherein the mutagenesis, mutation, and selection are part of a parallel mutagenesis and dynamic parallel selection process.

46. The method of claim 44 or claim 45, wherein induction of mutagenesis comprises the use of a mutagenesis plasmid.

47. The method of claim 46, wherein the mutagenesis plasmid is MP6.

48. The method of any one of claims 44 to 47, wherein prior to step (i), two rounds of mutagenesis and selection are applied.

49. The method of any one of claims 25 to 48, further comprising, after step (iii) and/or (c):
obtaining a cell culture from the prokaryotic cell,
inducing mutagenesis in the cell culture,
maintaining the cell culture under exponential growth conditions, and
selecting a prokaryotic cell, from said cell culture, with an increased growth rate compared to the initial culture.

50. The method of claim 49, wherein the mutagenesis, mutation, and selection are part of a parallel mutagenesis and dynamic parallel selection process.

51. The method of claim 49 or claim 50, wherein induction of mutagenesis comprises the use of a mutagenesis plasmid, wherein the mutagenesis plasmid does not contain any occurrences of the first or second type of sense codon nor any occurrences of the first type of stop codon.

52. The method of claim 51, wherein the mutagenesis plasmid is MP6, wherein the MP6 has been recoded to not contain any occurrences of the first or second type of sense codon nor any occurrences of the first type of stop codon.

53. The method of any one of claims 49 to 52, wherein three rounds of mutagenesis and selection are applied.

54. The method of any one of claims 44 to 53, wherein
mutagenesis is carried out for 5, 10, 15, 17, 20, 30, 45, 60, 70, 80, 100, 150, 200, or more generations; and/or
the cell culture is maintained under exponential growth conditions for 5, 10, 15, 20, 30, 40, 50, 52, 60, 70, 80, 100, 200, or more generations.

55. The method of any one of claims 25 to 54, wherein the prokaryotic cell is a bacterial cell or an Escherichia coli cell.

56. A method of synthesising a polymer, comprising:
i) providing a prokaryotic cell of any one of claims 1 to 24, or generated according to the methods of any one of claims 25 to 55, wherein the prokaryotic cell comprises the first orthogonal aminoacyl-tRNA synthetase-tRNA pair; and
contacting said prokaryotic cell with a nucleic acid sequence encoding a polymer, said nucleic acid sequence comprising the first type of sense codon;
ii) incubating the prokaryotic cell in the presence of a first non-canonical amino acid, wherein the first non-canonical amino acid is a substrate for the first orthogonal aminoacyl-tRNA synthetase; and
iii) incubating the prokaryotic cell to allow incorporation of the first non-canonical amino acid into the polymer via the first orthogonal aminoacyl-tRNA synthetase-tRNA pair.

57. The method of claim 56, wherein the prokaryotic cell comprises the second orthogonal aminoacyl-tRNA synthetase-tRNA pair and the nucleic acid sequence comprises the second type of sense codon, and wherein
step ii) comprises incubating the prokaryotic cell in the presence of a second non-canonical amino acid, wherein the second non-canonical amino acid is a substrate for the second orthogonal aminoacyl-tRNA synthetase; and
step iii) comprises incubating the prokaryotic cell to allow incorporation of the second non-canonical amino acid into the polymer via the second first orthogonal aminoacyl-tRNA synthetase-tRNA pair.

58. The method of claim 56 or 57, wherein the prokaryotic cell comprises the third orthogonal aminoacyl-tRNA synthetase-tRNA pair and the nucleic acid sequence comprises the first type of stop codon, and wherein
step ii) comprises incubating the prokaryotic cell in the presence of a third non-canonical amino acid, wherein the third non-canonical amino acid is a substrate for the third orthogonal aminoacyl-tRNA synthetase; and
step iii) comprises incubating the prokaryotic cell to allow incorporation of the third non-canonical amino acid into the polymer via the third first orthogonal aminoacyl-tRNA synthetase-tRNA pair.

59. The method of any one of claims 56 to 58, further comprising:
iv) purifying the synthesised polymer.

60. The method of any one of claims 56 to 59, wherein the synthesised polymer comprises at least one non-canonical amino acid directly adjacent to another non-canonical amino acid.

61. The method of any one of claims 56 to 60, wherein the polymer comprises a chain of two, three, four, five, six, seven, eight, nine, ten, 15, 20, or more non-canonical amino acids directly adjacent to each other.

62. The method of any one of claims 56 to 61, wherein the polymer is a macrocycle.

63. The method of any one of claims 56 to 62, wherein the non-canonical amino acids comprise any one of, or any combination of, BocK, CbzK, AllocK, p-I-Phe, CypK, AlkK, 3-Nitro-Tyr, and p-Az-Phe.

64. A polymer obtained from or obtainable by the methods of any one of claims 56 to 63.

65. An isolated 1R26PylRS, or a variant with altered selectivity to a non-canonical amino acid.

66. The isolated 1R26PylRS of claim 65, wherein the isolated 1R26PylRS is at least 50%, 60%, 70%, 80%, 90%, 95%, 99%, or 100% identical to SEQ ID NO: 9, comprising any one of the following groups of mutations: i) L121L, L125L, Y126G, M129L, N166N, V168V, Y206Y, A223A; ii) L121L, L125L, Y126Y, M129A, N166N, V168V, Y206F, A223A; iii) L121L, L125L, Y126Y, M129M, N166Q, V168V, Y206F, A223A; iv) L121L, L125L, Y126Y, M129M, N166S, V168M, Y206F, A223G; and v) L121M, L125I, Y126F, M129A, N166N, V168F, Y206Y, A223A.

67. The isolated 1R26PylRS of claim 65, wherein the isolated 1R26PylRS is at least 50%, 60%, 70%, 80%, 90%, 95%, 99%, or 100% similar or identical to any one of SEQ ID NOs: 10 to 14.

68. An isolated Archaeoglobus fulgidus tyrosyl-tRNA synthetase (AfTyrRS), or a variant with altered selectivity to a non-canonical amino acid.

69. The isolated AfTyrRS of claim 68, wherein the isolated AfTyrRS is at least 50%, 60%, 70%, 80%, 90%, 95%, 99%, or 100% identical to SEQ ID NO: 16, comprising any one of the following groups of mutations: i) Y36I, L69M, H74L, Q116E, D165T, I166G, and N190N; ii) Y36T, L69L, H74L, Q116E, D165T, I166G, N190K; and iii) Y36I, L69L, H74L, Q116E, D165T, I166G, N190N.

70. The isolated AfTyrRS of claim 68, wherein the isolated AfTyrRS is at least 50%, 60%, 70%, 80%, 90%, 95%, 99%, or 100% similar or identical to any one of SEQ ID NOs: 16 to 19.

71. An isolated Lum1PylRS, or a variant with altered selectivity to a non-canonical amino acid.

72. The isolated Lum1PylRS of claim 71, wherein the Lum1PylRS is at least 50%, 60%, 70%, 80%, 90%, 95%, 99%, or 100% identical to SEQ ID NO: 32, comprising any one of the following groups of mutations: i) L121L, L125L, Y126G, M129L, V168V; and ii) L121M, L125I, Y126F, M129A, V168F.

73. The isolated Lum1PylRS of claim 71, wherein the Lum1PylRS is at least 50%, 60%, 70%, 80%, 90%, 95%, 99%, or 100% similar or identical to any one of SEQ ID NOs: 32 to 34.

74. An isolated NitroPylRS, or a variant with altered selectivity to a non-canonical amino acid.

75. The isolated NitroPylRS of claim 74, wherein the NitroPylRS is at least 50%, 60%, 70%, 80%, 90%, 95%, 99%, or 100% identical to SEQ ID NO: 36, comprising the following substitutions L123M, L127I, Y128F, M131A, and V169F.

76. The isolated NitroPylRS of claim 74, wherein the NitroPylRS is at least 50%, 60%, 70%, 80%, 90%, 95%, 99%, or 100% similar or identical to SEQ ID NO: 35 or SEQ ID NO: 36.

77. An isolated ClosΔNTDPylRS, or a variant with altered selectivity to a non-canonical amino acid.

78. The isolated ClosΔNTDPylRS of claim 77, wherein the ClosΔNTDPylRS is at least 50%, 60%, 70%, 80%, 90%, 95%, 99%, or 100% identical to SEQ ID NO: 37, comprising any one of the following groups of mutations: i) Y126G, M129L, Y208Y, and ii) Y126Y, M129A, Y208F.

79. The isolated ClosΔNTDPylRS of claim 77, wherein the ClosΔNTDPylRS is at least 50%, 60%, 70%, 80%, 90%, 95%, 99%, or 100% similar or identical to any one of SEQ ID NOs: 37 to 39.

80. An isolated TronΔNTDPylRS, or a variant with altered selectivity to a non-canonical amino acid.

81. The isolated TronΔNTDPylRS of claim 80, wherein the TronΔNTDPylRS is at least 50%, 60%, 70%, 80%, 90%, 95%, 99%, or 100% similar or identical to SEQ ID NO: 40.

82. An isolated GemmΔNTDPylRS, or a variant with altered selectivity to a non-canonical amino acid.

83. The isolated GemmΔNTDPylRS of claim 82, wherein the GemmΔNTDPylRS is at least 50%, 60%, 70%, 80%, 90%, 95%, 99%, or 100% similar or identical to SEQ ID NO: 41.

84. An isolated PGA8ΔNTDPylRS, or a variant with altered selectivity to a non-canonical amino acid.

85. The isolated PGA8ΔNTDPylRS of claim 84, wherein the PGA8ΔNTDPylRS is at least 50%, 60%, 70%, 80%, 90%, 95%, 99%, or 100% similar or identical to SEQ ID NO: 42.

86. An isolated I2ΔNTDPylRS, or a variant with altered selectivity to a non-canonical amino acid.

87. The isolated I2ΔNTDPylRS of claim 86, wherein the I2ΔNTDPylRS is at least 50%, 60%, 70%, 80%, 90%, 95%, 99%, or 100% similar or identical to SEQ ID NO: 43.

88. An isolated D121ΔNTDPylRS, or a variant with altered selectivity to a non-canonical amino acid.

89. The isolated D121ΔNTDPylRS of claim 88, wherein the D121ΔNTDPylRS is at least 50%, 60%, 70%, 80%, 90%, 95%, 99%, or 100% similar or identical to SEQ ID NO: 44.

90. An isolated D416ΔNTDPylRS, or a variant with altered selectivity to a non-canonical amino acid.

91. The isolated D416ΔNTDPylRS of claim 90, wherein the D416ΔNTDPylRS is at least 50%, 60%, 70%, 80%, 90%, 95%, 99%, or 100% similar or identical to SEQ ID NO: 45.

92. The tRNA synthetase according to any one of claims 65 to 91, wherein the tRNA synthetase has altered selectivity towards any of: AllocK, AlkK, BocK, Bta, CbzK, CypK, 3-Nitro-Tyr, NMH, p-I-Phe, and p-Az-Phe, and o-Methyl-Tyrosine.

93. An isolated tRNA, wherein the isolated tRNA is at least 80%, 90%, 95%, 99%, or 100% identical to any one of SEQ ID NOs: 15, 20, 46-52, 54-58, 61-66.

94. A host cell comprising the tRNA synthetase according to any one of claims 65 to 92 and a tRNA, wherein the tRNA synthetase and tRNA form an orthogonal aminoacyl-tRNA synthetase-tRNA pair.

95. A host cell comprising any combination of two or three items selected from the list:
(i) the tRNA synthetase according to any one of claims 65 to 67 and a tRNA, wherein the tRNA synthetase and tRNA form an orthogonal aminoacyl-tRNA synthetase-tRNA pair;
(ii) an Archaeoglobus fulgidus tyrosyl-tRNA synthetase (AfTyrRS), or a variant with altered selectivity to a non-canonical amino acid, and an Af-tRNA^{Tyr(A01)}_{YYY} wherein the AfTyrRS and Af-tRNA^{Tyr(A01)}_{YYY} form an orthogonal aminoacyl-tRNA synthetase-tRNA pair;
(iii) a MmPylRS tRNA synthetase, or a variant with altered selectivity to a non-canonical amino acid, and a MmtRNA^{Pyl}_{YYY}, wherein the MmPylRS tRNA synthetase and the MmtRNA^{Pyl}_{YYY} form an orthogonal aminoacyl-tRNA synthetase-tRNA pair.

96. A host cell comprising any combination of two or three items selected from the list:
(i) the tRNA synthetase according to any one of claims 65 to 67 and a tRNA, wherein the tRNA synthetase and tRNA form an orthogonal aminoacyl-tRNA synthetase-tRNA pair;
(ii) an AfTyrRS, or a variant with altered selectivity to a non-canonical amino acid, and an Af-tRNA^{Tyr(A01)}_{YYY}, wherein the AfTyrRS and Af-tRNA^{Tyr(A01)}_{YYY} form an orthogonal aminoacyl-tRNA synthetase-tRNA pair;
(iii) an M jannaschii tyrosyl-tRNA synthetase (MjTyrRS), or a variant with altered selectivity to a non-canonical amino acid, and a MjtRNA^{Tyr}_{YYY}, wherein the MjTyrRS and the MjtRNA^{Tyr}_{YYY} form an orthogonal aminoacyl-tRNA synthetase-tRNA pair.

97. A host cell comprising any combination of two or three items selected from the list:
i) a class A ΔNPylRS/^{ΔNPyl}tRNA pair;
ii) a class B ΔNPylRS/^{ΔNPyl}tRNA pair; and
iii) an MmPylRS/Spe^{Pyl}tRNA pair.

98. The host cell of any one of claims 94 to 96, wherein the host cell is a prokaryotic cell or eukaryotic cell, a bacterial cell, an E. coli. cell, a mammalian cell, an insect cell, or a human cell.

99. A method for improving the growth rate of a prokaryotic cell wherein the genome has been recoded, wherein the method comprises:
inducing mutagenesis in a cell culture comprising the prokaryotic cell that comprises the recoded genome,
maintaining the cell culture under exponential growth conditions,
selecting a prokaryotic cell, from said cell culture, with an increased growth rate compared to the initial culture.

100. The method of claim 99, wherein the mutagenesis, mutation, and selection are part of a parallel mutagenesis and dynamic parallel selection process.

101. The method of claim 99 or claim 100, wherein induction of mutagenesis comprises the use of a mutagenesis plasmid, optionally wherein the mutagenesis plasmid is a recoded mutagenesis plasmid.

102. The method of claim 101, wherein the mutagenesis plasmid is MP6.

103. The method of any one of claims 99 to 102, wherein two rounds of mutagenesis and selection are applied.

104. The method of any one of claims 99 to 103, wherein
mutagenesis is carried out for 5, 10, 15, 17, 20, 30, 45, 60, 70, 80, 100, 150, 200, or more generations; and/or
the cell culture is maintained under exponential growth conditions for 5, 10, 15, 20, 30, 40, 50, 52, 60, 70, 80, 100, 200, or more generations.

105. The method of any one of claims 99 to 104 wherein the prokaryotic cell is a bacterial cell or an Escherichia coli cell.

106. A prokaryotic cell obtained or obtainable by the method of any one of claims 99 to 105, wherein the growth rate of the prokaryotic cell is faster than the growth rate of a reference prokaryotic cell of a parental strain.

107. A prokaryotic cell, wherein the prokaryotic cell:
does not express a first endogenous tRNA;
comprises a genome wherein a first type of sense codon has been recoded such that the first endogenous tRNA is dispensable;
expresses a first orthogonal aminoacyl-tRNA synthetase and a first orthogonal tRNA,
the first orthogonal aminoacyl-tRNA synthetase and the first orthogonal tRNA form a first orthogonal aminoacyl-tRNA synthetase-tRNA pair, and
the first orthogonal tRNA is capable of decoding the first type of sense codon.

108. The prokaryotic cell of claim 107, wherein:
the essential genes of the genome do not contain occurrences of the first type of sense codon, and the first endogenous tRNA is a cognate tRNA for the first type of sense codon.

109. The prokaryotic cell of claim 107 or claim 108, wherein:
the genome comprises 5, 4, 3, 2, 1, or no occurrences of the first type of sense codon, and the first endogenous tRNA is a cognate tRNA for the first type of sense codon.

110. The prokaryotic cell of any one of claims 107 to 109, wherein
the first type of sense codon is TCA and the first endogenous tRNA is tRNA^{Ser}_{UGA}; or
the first type of sense codon is TCG and the first endogenous is tRNA^{Ser}_{CGA}

111. The prokaryotic cell of claim 110, wherein
a plurality of occurrences of the TCA codon in the parental strain have been replaced with AGT; and/or
a plurality of occurrences of the TCG codon in the parental strain have been replaced with AGC.

112. The prokaryotic cell of any one of claims 107 to 111, wherein the prokaryotic cell:
does not express a second endogenous tRNA;
comprises a genome wherein a second type of sense codon has been recoded such that the second endogenous tRNA is dispensable;
expresses a second orthogonal aminoacyl-tRNA synthetase and a second tRNA,
the second orthogonal aminoacyl-tRNA synthetase and the second orthogonal tRNA form a second orthogonal aminoacyl-tRNA synthetase-tRNA pair, and
the second orthogonal tRNA is capable of decoding the second type of sense codon.

113. The prokaryotic cell of claim 112, wherein:
the essential genes of the genome do not contain occurrences of the second type of sense codon, and the second endogenous tRNA is a cognate tRNA for the second type of sense codon.

114. The prokaryotic cell of claim 112 or claim 113, wherein:
the genome of comprises 5, 4, 3, 2, 1, or no occurrences of the second type of sense codon, and the second endogenous tRNA is a cognate tRNA for the second type of sense codon.

115. The prokaryotic cell of any one of claims 112 to 114, wherein
the second type of sense codon is TCA and the second endogenous tRNA is tRNA^{Ser}_{UGA}; or
the second type of sense codon is TCG and the second endogenous is tRNA^{Ser}_{CGA}.

116. The prokaryotic cell of any one of claims 107 to 115, wherein:
the prokaryotic cell does not express a first endogenous release factor;
a first type of stop codon has been recoded within the genome such that the first endogenous release factor is dispensable;
the prokaryotic cell expresses a third orthogonal aminoacyl-tRNA synthetase and a third orthogonal tRNA,
the third orthogonal aminoacyl-tRNA synthetase and the third orthogonal tRNA form a third orthogonal aminoacyl-tRNA synthetase-tRNA pair, and
the third orthogonal tRNA is capable of decoding the first type of stop codon.

117. The prokaryotic cell of claim 116, wherein the essential genes of the genome do not contain occurrences of the first type of stop codon, and the first endogenous release factor is a cognate release factor for the first type of stop codon.

118. The prokaryotic cell of claim 116 or 117, wherein the genome comprises 5, 4, 3, 2, 1, or no occurrences of the first type of stop codon, and the first endogenous release factor is a cognate release factor for the first type of stop codon.

119. The prokaryotic cell of any one of claims 116 to 118, wherein the first type of stop codon is TAG and wherein the first endogenous release factor is RF-1.

120. The prokaryotic cell of claim 119, wherein occurrences of the TAG codon in the parental strain have been replaced with TAA.

121. The prokaryotic cell of any one of claims 107 to 120, wherein the prokaryotic cell is a bacterial cell or an Escherichia coli cell.

122. The prokaryotic cell of any one of claims 107 to 121, wherein the prokaryotic cell is viable.
